(19) United States
(12) Patent Application Publication
(10) Pub. No.: US 2017/0166877 A1
(43) Pub. Date: Jun. 15, 2017

(54) DUAL CONTROLS FOR THERAPEUTIC CELL ACTIVATION OR ELIMINATION

(71) Applicant: Bellicum Pharmaceuticals, Inc., Houston, TX (US)

(72) Inventors: Joseph Henri BAYLE, Houston, TX (US); MyLinh Thi DUONG, Houston, TX (US); Matthew Robert COLLINSON-PAUTZ, Houston, TX (US); Aaron Edward FOSTER, Houston, TX (US); David Michael SPENCER, SR., Houston, TX (US)

(21) Appl. No.: 15/377,776

(22) Filed: Dec. 13, 2016

Related U.S. Application Data
(60) Provisional application No. 62/267,277, filed on Dec. 14, 2015.

(51) Int. Cl. C12N 9/64; C12N 9/90; A61K 39/00; C07K 14/705; C12N 5/0783; A61K 35/17; C12N 9/12; C07K 14/47

(52) U.S. Cl. CPC C12N 9/6472; C12N 9/12; C12N 9/90; C07K 14/4705; C07K 14/70578; C12Y 304/22062; C12Y 207/11001; C12Y 502/01008; C12N 5/0636; A61K 35/17; A61K 39/0005; A61K 38/00

(57) ABSTRACT

The technology relates in part to methods for controlling the activity or elimination of therapeutic cells using molecular switches that employ distinct heterodimerizer ligands, in conjunction with other multimeric ligands. The technology may be used, for example to activate or eliminate cells used to promote engraftment, to treat diseases or condition, or to control or modulate the activity of therapeutic cells that express chimeric antigen receptors or recombinant T cell receptors.

### RELATED APPLICATIONS

[0001] Priority is claimed to U.S. Provisional Patent Application Ser. No. 62/267,277, filed Dec. 14, 2015, entitled “Dual Controls for Therapeutic Cell Activation or Elimination” which is referred to and incorporated by reference thereof, in its entirety.

### SEQUENCE LISTING

[0002] The instant application contains a Sequence Listing which has been submitted electronically in ASCII format and is hereby incorporated by reference in its entirety. Said ASCII copy, created on Jan. 26, 2017, is named BEL-2025-UT_SL.TXT and is 1,427,145 bytes in size.

### FIELD

[0003] The technology relates in part to methods for controlling the activity or elimination of therapeutic cells using molecular switches that employ distinct heterodimerizer ligands, in conjunction with other multimeric ligands. The technology may be used, for example to activate or eliminate cells used to promote engraftment, to treat diseases or condition, or to control or modulate the activity of therapeutic cells that express chimeric antigen receptors or recombinant T cell receptors.

### BACKGROUND

[0004] There is an increasing use of cellular therapy in which modified or unmodified cells, such as T cells, are administered to a patient. In some examples, cells are genetically engineered to express a heterologous gene, these modified cells are then administered to patients. Heterologous genes may be used to express chimeric antigen receptors (CARs), which are artificial receptors designed to convey antigen specificity to T cells without the requirement for MHC antigen presentation. They include an antigen-specific component, a transmembrane component, and an intracellular component selected to activate the T cell and provide specific immunity. CAR-expressing T cells may be used in various therapies, including cancer therapies. These treatments are used, for example, to target tumors for elimination, and to treat cancer and blood disorders, but these therapies may have negative side effects.

[0005] In some instances of therapeutic cell-induced adverse events, there is a need for rapid and near complete elimination of the therapeutic cells. Overzealous on-target effects, such as those directed against large tumor masses, can lead to cytokine storms, associated with tumor lysis syndrome (TLS), cytokine release syndrome (CRS) or macrophage activation syndrome (MAS). As a result, there is great interest in the development of a stable, reliable “suicide gene” that can eliminate transferred T cells or stem cells in the event that they trigger serious adverse events (SAEs), or become obsolete following treatment. Yet in some instances, the need for therapy may remain, and there may be a way to reduce the negative effects, while maintaining a sufficient level of therapy.

[0006] In some instances, there is a need to increase the activity of the therapeutic cell. For example, costimulating polypeptides may be used to enhance the activation of T cells, and of CAR-expressing T cells against target antigens, which would increase the potency of adoptive immunotherapy.

[0007] Thus, there is a need for controlled activation or elimination of therapeutic cells, to rapidly enhance the activity of or to remove the possible negative effects of donor cells used in cellular therapy, while retaining part or all of the beneficial effects of the therapy.

### SUMMARY

[0008] Chemical Induction of Dimerization (CID) with small molecules is an effective technology used to generate switches of protein function to alter cell physiology. A high specificity, efficient dimerizer is rimiducid (AP1903), which has two identical, protein-binding surfaces arranged tail-to-tail, each with high affinity and specificity for a mutant or vaiant of FKBP12: FKBP12(F36V) (FKBP12v36, F_{V36} or F_{V}), Attachment of one or more F_{V} domains onto one or more cell signaling molecules that normally rely on homodimerization can convert that protein to rimiducid control. Homodimerization with rimiducid is used in the context of an inducible caspase safety switch, and an inducible activation switch for cellular therapy, where costimulatory polypeptides including MyD88 and CD40 polypeptides are used to stimulate immune activity. Because both of these switches rely on the same ligand inducer, it is difficult to control both functions using these switches within the same cell. In some embodiments, a molecular switch is provided that is controlled by a distinct dimerizer ligand, based on the heterodimerizing small molecule, rapamycin, or rapamycin analogs (“rapalogs”). Rapamycin binds to FKBP12, and its variants, and can induce heterodimerization of signaling domains that are fused to FKBP12 by binding to both FKBP12 and to polypeptides that contain the FKBP-rapamycin-binding (FRB) domain of mTOR. Provided in some embodiments of the present application are molecular switches that greatly augment the use of rapamycin, rapalogs and rimiducid as agents for therapeutic applications. In certain embodiments, the allele specificity of rimiducid is used to allow selective dimerization of Fᵥ-fusions. In other embodiments, a rapamycin or rapalog-inducible pro-apoptotic polypeptide, such as, for example, Caspase-9 or a rapamycin or rapalog-inducible costimulatory polypeptide, such as, for example, MyD88/CD40 (MC) is used in combination with a rimiducid-inducible pro-apoptotic polypeptide, such as, for example, Caspase-9, or a rimiducid-inducible chimeric stimulating polypeptide, such as, for example, iMC to produce dual-switches. These dual-switches can be used to control both cell proliferation and apoptosis selectively by administration of either of two distinct ligand inducers.

[0009] In other embodiments, a molecular switch is provided that provides the option to activate a pro-apoptotic polypeptide, such as, for example, Caspase-9, with either rimiducid, or rapamycin or a rapalog, wherein the chimeric pro-apoptotic polypeptide comprises both a rimiducid-induced switch and a rapamycin-, or rapalog-, induced switch. Including both molecular switches on the same chimeric pro-apoptotic polypeptide provides flexibility in a clinical setting, where the clinician can choose to administer the appropriate drug based on its specific pharmacological properties, or for other considerations, such as, for example, availability. These chimeric pro-apoptotic polypeptides may comprise, for example, both a FKBP12-Rapamycin-binding domain of mTOR (FRB), or an FRB variant, and an FKBP12 variant polypeptide, such as, for example, FKBP12v36. By FRB variant polypeptide is meant an FRB polypeptide that binds to a rapamycin analog (rapalog), for example, a rapalog provided in the present application. FRB variant polypeptides comprise one or more amino acid substitutions, bind to a rapalog, and may bind, or may not bind to rapamycin.

[0010] In one embodiment of the dual-switch technology, (Fwt.FRBΔC9/MC.FvFv) a homodimerizer, such as AP1903 (rimiducid), induces activation of a modified cell, and a heterodimerizer, such as rapamycin or a rapalog, activates a safety switch, causing apoptosis of the modified cell. In this embodiment, for example, a chimeric pro-apoptotic polypeptide, such as, for example, Caspase-9, comprising both an FKBP12 and an FRB, or FRB variant region (iFwtFRBC9) is expressed in a cell along with an inducible chimeric MyD88/CD40 costimulating polypeptide, that comprises MyD88 and CD40 polypeptides and at least two copies of FKBP12v36 (MC.FvFv). Upon contacting the cell with a dimerizer that binds to the Fv regions, the MC.FvFv dimerizes or multimerizes, and activates the cell. The cell may, for example, be a T cell that expresses a chimeric antigen receptor directed against a target antigen (CARζ). As a safety switch, the cell may be contacted with a heterodimerizer, such as, for example, rapamycin, or a rapalog, that binds to the FRB region on the iFwtFRBC9 polypeptide, as well as the FKBP12 region on the iFwtFRBC9 polypeptide, causing direct dimerization of the Caspase-9 polypeptide, and inducing apoptosis. (FIG. 43 (2), FIG. 57) In another mechanism, the heterodimerizer binds to the FRB region on the iFwtFRBC9 polypeptide, and the Fv region on the MC.FvFv polypeptide, causing scaffold-induced dimerization, due to the scaffold of two FKBP12v36 polypeptides on each MC.FvFv polypeptide (FIG. 43 (1)), and inducing apoptosis. By FKBP12 variant polypeptide is meant an FKBP12 polypeptide that comprises one or more amino acid substitutions and that binds to a ligand such as, for example, rimiducid, with at least 100 times, 500 times, or 1000 times more affinity than the ligand binds to the FKBP12 polypeptide region.

[0011] In another embodiment of the dual-switch technology, (FRBFwtMC/FvC9) a heterodimerizer, such as rapamycin or a rapalog, induces activation of a modified cell, and a homodimerizer, such as AP1903 activates a safety switch, causing apoptosis of the modified cell. In this embodiment, for example, a chimeric pro-apoptotic polypeptide, such as, for example, Caspase-9, comprising an Fv region (iFvC9) is expressed in a cell along with an inducible chimeric MyD88/CD40 costimulating polypeptide, that comprises MyD88 and CD40 polypeptides and both an FKBP12 and an FRB or FRB variant region (iFRBFwtMC) (MC.FvFv). Upon contacting the cell with rapamycin or a rapalog that heterodimerizes the FKBP12 and FRB regions, the iFRBFwtMC dimerizes or multimerizes, and activates the cell. The cell may, for example, be a T cell that expresses a chimeric antigen receptor directed against a target antigen (CARζ). As a safety switch, the cell may be contacted with a homodimerizer, such as, for example, AP1903, that binds to the iFvC9 polypeptide, causing direct dimerization of the Caspase-9 polypeptide, and inducing apoptosis. (FIG. 57 (right)).

[0012] It yet another embodiment of the dual switch compositions and methods of the present application, dual switch apoptotic polypeptides, modified cells that express the dual switch apoptotic polypeptides, and nucleic acids that encode the dual switch apoptotic polypeptides are provided. These dual switch chimeric pro-apoptotic polypeptides allow for a choice of ligand inducer. For example, in one embodiment, modified cells are provided that expresses a FRB.FKBP_{V}.ΔC9 polypeptide, or a FKBPᵥ.FRBΔC9 polypeptide; apoptosis may be induced by contacting the modified cell with either a heterodimer, such as rapamycin or a rapalog, or the homodimer, rimiducid.

[0013] Thus, in some embodiments, modified cells are provided that comprise polynucleotides that encode dual switch chimeric pro-apoptotic polypeptides, for example, FRB.FKBP_{V}.ΔC9 polypeptide, or a FKBPv.FRBΔC9 polypeptides, wherein the FRB polypeptide region may be an FRB variant polyeptide region, such as, for example, FRB_{L}. It is understood that where FRB is denoted, such as, for example, the table of nomenclature herein, other FRB derivatives may be used, such as, for example, FRB_{L} Similarly, where polypeptides comprising FRB_{L} is provided as an example of a composition or method of the present application, it is understood that RB or FRB variants or derivatives other than FRB_{L} may be used, with the appropriate ligand, such as rapamycin or a rapalog. It is also understood that FKBP12 variants other than FKBP12v36 may be substituted for FKBP12v36, as appropriate The modified cells may further comprise polynucleotides that encode a heterologous protein such as, for example, a chimeric antigen receptor or a recombinant T cell receptor. The modified cells may further comprise polynucleotides that encode a costimulatory polypeptide, such as, for example, a polypeptide that comprises a MyD88 polypeptide region, or a truncated MyD88 polypeptide region lacking the TIR domain, or, for example, a polypeptide that comprises a MyD88 polypeptide region or a truncated MyD88 polypeptide region lacking the TIR domain and a CD40 cytoplasmic polypeptide region lacking the extracellular domain. Also provided in some embodiments are nucleic acids that comprise polynucleotides that encode dual switch chimeric pro-apoptotic polypeptides, for example, FRB.FKBPV.ΔC9 polypeptide, or a FKBPv.FRBΔC9 polypeptides, wherein the FRB polypeptide region may be an FRB variant polyeptide region, such as, for example, FRB_{L}. The nucleic acids may further comprise polynucleotides that encode a heterologous protein such as, for example, a chimeric antigen receptor or a recombinant T cell receptor. The nucleic acids may further comprise polynucleotides that encode a costimulatory polypeptide, such as, for example, a polypeptide that comprises a MyD88 polypeptide region, or a truncated MyD88 polypeptide region lacking the TIR domain, or, for example, a polypeptide that comprises a MyD88 polypeptide region or a truncated MyD88 polypeptide region lacking the TIR domain and a CD40 cytoplasmic polypeptide region lacking the extracellular domain.

[0014] In some embodiments of the present application, chimeric polypeptides are provided, wherein a first chimeric polypeptide comprises a first multimerizing region that binds to a first ligand; the first multimerizing region comprises a first ligand binding unit and a second ligand binding unit; the first ligand is a multimeric ligand comprising a first portion and a second portion; the first ligand binding unit binds to the first portion of the first ligand and does not bind significantly to the second portion of the first ligand; and the second ligand binding unit binds to the second portion of the first ligand and does not bind significantly to the first portion of the first ligand. In some embodiments, a second chimeric polypeptide is also provided, wherein the second chimeric polypeptide comprises a second multimerizing region that binds to a second ligand; the second multimerizing region comprises a third ligand binding unit; the second ligand is a multimeric ligand comprising a third portion; and the third ligand binding unit binds to the third portion of the second ligand and does not bind significantly to the second portion of the first ligand. Examples of first ligand binding units include, but are not limited to, FKBP12 multimerizing regions, or variants, such as FKBP12v36, examples of second ligand binding units are, for example, FRB or FRB variant multimerizing regions. Examples of a third ligand binding unit include, for example, but are not limited to, FKBP12 multimerizing regions, or variants, such as FKBP12v36. In certain embodiments, the first ligand binding unit is FKBP12, and the third ligand binding unit is FKBP12v36. In certain embodiments, the first ligand is rapamycin, or a rapalog, and the second ligand is rimiducid (AP1903).

[0015] The multimerizing regions, such as FKBP12/FRB, FRB/FKBP12, and FKBP12v36, may be located amino terminal to the pro-apoptotic polypeptide or costimulatory polypeptide, or, in other examples, may be located carboxyl terminal to the pro-apoptotic polypeptide or costimulatory polypeptide. Additional polypeptides, such as, for example, linker polypeptides, stem polypeptides, spacer polypeptides, or in some examples, marker polypeptides, may be located between the multimerizing region and the pro-apoptotic polypeptide or costimulatory polypeptide, in the chimeric polypeptides.

[0016] Thus, provided in some embodiments are modified cells, comprising a first polynucleotide encoding a chimeric pro-apoptotic polypeptide, wherein the chimeric pro-apoptotic polypeptide comprises (i) a pro-apoptotic polypeptide region; (ii) a FKBP12-Rapamycin-Binding (FRB) domain polypeptide, or FRB variant polypeptide region; and (iii) a FKBP12 or FKBP12 variant polypeptide region (FKBP12v); and a second polynucleotide encoding a chimeric costimulating polypeptide, wherein the chimeric costimulating polypeptide comprises one or more, for example, 1, 2, or 3 FKBP12 variant polypeptide regions and i) a MyD88 polypeptide region or a truncated MyD88 polypeptide region lacking the TIR domain; or ii) a MyD88 polypeptide region or a truncated MyD88 polypeptide region lacking the TIR domain, and a CD40 cytoplasmic polypeptide region lacking the CD40 extracellular domain. In some embodiments, the modified cell further comprises a third polynucleotide encoding a chimeric antigen receptor or a recombinant T cell receptor. Also provided in some embodiments is a nucleic acid comprising a promoter operably linked to a first polynucleotide encoding a chimeric pro-apoptotic polypeptide, wherein the chimeric pro-apoptotic polypeptide comprises (i) a pro-apoptotic polypeptide region; (ii) a FKBP12-Rapamycin-Binding (FRB) domain polypeptide, or FRB variant polypeptide region; and (iii) a FKBP12 or FKBP12 variant polypeptide region (FKBP12v); and a second polynucleotide encoding a chimeric costimulating polypeptide, wherein the chimeric costimulating polypeptide comprises one or more, for example, 1, 2, or 3 FKBP12 variant polypeptide regions and i) a MyD88 polypeptide region or a truncated MyD88 polypeptide region lacking the TIR domain; or ii) a MyD88 polypeptide region or a truncated MyD88 polypeptide region lacking the TIR domain, and a CD40 cytoplasmic polypeptide region lacking the CD40 extracellular domain. In some embodiments, the chimeric costimulating polypeptide comprises a truncated MyD88 polypeptide region lacking the TIR domain and a CD40 cytoplasmic polypeptide region lacking the CD40 extracellular domain. In some embodiments, the promoter is operably linked to a third polynucleotide, wherein the third polynucleotide encodes a chimeric antigen receptor or a recombinant T cell receptor. In some embodiments, the pro-apoptotic polypeptide is a Caspase-9 polypeptide, wherein the Caspase-9 polypeptide lacks the CARD domain. In some embodiments, the cell is a T cell, tumor infiltrating lymphocyte, NK-T cell, or NK cell. Also provided in some embodiments are kits or compositions comprising nucleic acid comprising a first polynucleotide encoding a chimeric pro-apoptotic polypeptide, wherein the chimeric pro-apoptotic polypeptide comprises (i) a pro-apoptotic polypeptide region; (ii) a FKBP12-Rapamycin-Binding (FRB) domain polypeptide region, or variant thereof; and (iii) a FKBP12 polypeptide or FKBP12 variant polypeptide region (FKBP12v); and a second polynucleotide encoding a chimeric costimulating polypeptide, wherein the chimeric costimulating polypeptide comprises one or more, for example, 1, 2, or 3 FKBP12 variant polypeptide regions and i) a MyD88 polypeptide region or a truncated MyD88 polypeptide region lacking the TIR domain; or

ii) a MyD88 polypeptide region or a truncated MyD88 polypeptide region lacking the TIR domain, and a CD40 cytoplasmic polypeptide region lacking the CD40 extracellular domain.

[0017] In some embodiments, methods are provided for expressing a chimeric pro-apoptotic polypeptide, wherein the chimeric pro-apoptotic polypeptide comprises a pro-apoptotic polypeptide region; a FRB polypeptide or FRB variant polypeptide region; and a FKBP12 polypeptide region of the present embodiments, comprising contacting a nucleic acid of the present embodiments with a cell under conditions in which the nucleic acid is incorporated into the cell, whereby the cell expresses the chimeric pro-apoptotic polypeptide from the incorporated nucleic acid.

[0018] In some embodiments, methods are provided for stimulating an immune response in a subject, comprising: transplanting modified cells of the present embodiments into the subject, and after (a), administering an effective amount of a ligand that binds to the FKBP12 variant polypeptide region of the chimeric costimulating polypeptide to stimulate a cell mediated immune response. In some embodiments, methods are provided for administering a ligand to a subject who has undergone cell therapy using modified cells, comprising administering a ligand that binds to the FKBP variant region of the chimeric costimulating polypeptide to the human subject, wherein the modified cells comprise modified cells of the present embodiments the present embodiments. Also provided are methods for treating a subject having a disease or condition associated with an elevated expression of a target antigen expressed by a target cell, comprising a) transplanting an effective amount of modified cells into the subject; wherein the modified cells comprise a modified cell of the present embodiments, wherein the modified cell comprises a chimeric antigen receptor or a recombinant T cell receptor comprising an antigen recognition moiety that binds to the target antigen, and b) after a), administering an effective amount of a ligand that binds to the FKBP12 variant polypeptide region of the chimeric costimulating polypeptide to reduce the number or concentration of target antigen or target cells in the subject. Also provided are methods for reducing the size of a tumor in a subject, comprising a) administering a modified cell of the present embodiments to the subject, wherein the cell comprises a chimeric antigen receptor or a recombinant T cell receptor comprising an antigen recognition moiety that binds to an antigen on the tumor; and b) after a), administering an effective amount of a ligand that binds to the FKBP12 variant polypeptide region of the chimeric costimulating polypeptide to reduce the size of the tumor in the subject. Also provided are methods for controlling survival of transplanted modified cells in a subject, comprising transplanting modified cells of the present embodiments into the subject; and administering to the subject rapamycin or a rapalog that binds to the FRB polypeptide or FRB variant polypeptide region of the chimeric pro-apoptotic polypeptide in an amount effective to kill at least 30% of the modified cells that express the chimeric pro-apoptotic polypeptide.

[0019] In other embodiments, modified cells are provided comprising a first polynucleotide encoding a chimeric pro-apoptotic polypeptide, wherein the chimeric pro-apoptotic polypeptide comprises i) a pro-apoptotic polypeptide region; and ii) a FKBP12 variant polypeptide region; and a second polynucleotide encoding a chimeric costimulating polypeptide, wherein the chimeric costimulating polypeptide comprises a FKBP12-Rapamycin Binding (FRB) domain polypeptide or FRB variant polypeptide region; a FKBP12 polypeptide or FKBP12 variant polypeptide region; and a MyD88 polypeptide region or a truncated MyD88 polypeptide region lacking the TIR domain, or a MyD88 polypeptide region, or a truncated MyD88 polypeptide region lacking the TIR domain and a CD40 cytoplasmic polypeptide region lacking the CD40 extracellular domain. In some embodiments, the chimeric costimulating polypeptide comprises a truncated MyD88 polypeptide region lacking the TIR domain and a CD40 cytoplasmic polypeptide region lacking the CD40 extracellular domain. In some embodiments, the cell further comprises a third polynucleotide, wherein the third polynucleotide encodes a chimeric antigen receptor or a recombinant T cell receptor.

[0020] In some embodiments, nucleic acids are provided, wherein the nucleic acids comprise a promoter operably linked to a first polynucleotide encoding a chimeric pro-apoptotic polypeptide, wherein the chimeric pro-apoptotic polypeptide comprises i) a pro-apoptotic polypeptide region; and i) a FKBP12 variant polypeptide region; and a second polynucleotide encoding a chimeric costimulating polypeptide, wherein the chimeric costimulating polypeptide comprises i) a FKBP12-Rapamycin Binding (FRB) domain polypeptide or FRB variant polypeptide region; ii) a FKBP12 polypeptide region; and ii) a MyD88 polypeptide region or a truncated MyD88 polypeptide region lacking the TIR domain, or a MyD88 polypeptide region or a truncated MyD88 polypeptide region lacking the TIR domain and a CD40 cytoplasmic polypeptide region lacking the CD40 extracellular domain. In some embodiments, the chimeric costimulating polypeptide comprises a truncated MyD88 polypeptide region lacking the TIR domain and a CD40 cytoplasmic polypeptide region lacking the CD40 extracellular domain. In some embodiments, the promoter is operably linked to a third polynucleotide, wherein the third polynucleotide encodes chimeric antigen receptor or a recombinant T cell receptor. In some embodiments, the pro-apoptotic polypeptide is a Caspase-9 polypeptide, wherein the Caspase-9 polypeptide lacks the CARD domain. In some embodiments, the cell is a T cell, tumor infiltrating lymphocyte, NK-T cell, or NK cell. Also provided are kits or compositions comprising nucleic acids comprising polynucleotides of the present embodiments. Also provided are methods for expressing a chimeric pro-apoptotic polypeptide and a chimeric costimulating polypeptide, wherein a) the chimeric pro-apoptotic polypeptide comprises i) a pro-apoptotic polypeptide region; and ii) a FKBP12 variant polypeptide region; and b) the chimeric costimulating polypeptide comprises a FRB or FRB variant polypeptide region; a FKBP12 polypeptide region; and a MyD88 polypeptide region or a truncated MyD88 polypeptide region lacking the TIR domain, or a MyD88 polypeptide region or a truncated MyD88 polypeptide region lacking the TIR domain and a CD40 cytoplasmic polypeptide region lacking the CD40 extracellular domain comprising contacting a nucleic acid is a nucleic acid comprising a promoter operably linked to a polynucleotide coding for a chimeric pro-apoptotic polypeptide, wherein the chimeric pro-apoptotic polypeptide comprises a) a pro-apoptotic polypeptide region; b) a FKBP12-Rapamycin binding domain (FRB) polypeptide or FRB variant polypeptide region; and c) a FKBP12 variant polypeptide region, with a cell under conditions in which the nucleic acid is incorporated into the cell, whereby the cell expresses the chimeric pro-apoptotic polypeptide and the chimeric costimulating polypeptide from the incorporated nucleic acid.

[0021] In some embodiments, methods are provided of stimulating an immune response in a subject, comprising: a) transplanting modified cells of the present embodiments into the subject, and b) after (a), administering an effective amount of a rapamycin or a rapalog that binds to the FRB polypeptide or FRB variant polypeptide region of the chimeric stimulating polypeptide to stimulate a cell mediated immune response. In some embodiments, methods are provided of administering a ligand to a subject who has undergone cell therapy using modified cells, comprising administering rapamycin or a rapalog to the subject, wherein the modified cells comprise modified cells of the present embodiments. In some embodiments, methods are provided for treating a subject having a disease or condition associated with an elevated expression of a target antigen expressed by a target cell, comprising a) transplanting an effective amount of modified cells into the subject; wherein the modified cells comprise a modified cell of the present embodiments, wherein the modified cell comprises a chimeric antigen receptor or a recombinant T cell receptor comprising an antigen recognition moiety that binds to the target antigen, and b) after a), administering an effective amount of rapamycin or a rapalog that binds to the FRB polypeptide or FRB variant region of the chimeric stimulating polypeptide to reduce the number or concentration of target antigen or target cells in the subject. In some embodiments, methods are provided for reducing the size of a tumor in a subject, comprising a) administering a modified cell of the present embodiments to the subject, wherein the cell comprises a chimeric antigen receptor or a recombinant T cell receptor comprising an antigen recognition moiety that binds to an antigen on the tumor; and b) after a), administering an effective amount of rapamycin or a rapalog that binds to the FRB or FRB variant polypeptide region of the chimeric stimulating polypeptide to reduce the size of the tumor in the subject. In some embodiments, methods are provided for controlling survival of transplanted modified cells in a subject, comprising a) transplanting modified cells of the present embodiments into the subject, and after (a), administering to the subject a ligand that binds to the FKBP12 variant polypeptide region of the chimeric pro-apoptotic polypeptide in an amount effective to kill at least 90% of the modified cells that express the chimeric pro-apoptotic polypeptide.

[0022] In some embodiments of the present application, the chimeric costimulating polypeptide comprises two FKBP12 variant polypeptide regions, and a truncated MyD88 polypeptide region lacking the TIR domain. In some embodiments, the chimeric costimulating polypeptide further comprises a CD40 cytoplasmic polypeptide region lacking the CD40 extracellular domain. In some embodiments of the present application, the chimeric costimulating polypeptide comprises 2 FKBP12 variant polypeptide regions.

[0023] Also provided in the present application is a nucleic acid comprising a promoter operably linked to a polynucleotide coding for a chimeric pro-apoptotic polypeptide, wherein the chimeric pro-apoptotic polypeptide comprises a) a pro-apoptotic polypeptide region; b) a FKBP12-Rapamycin binding domain (FRB) polypeptide or FRB variant polypeptide region; and c) a FKBP12 variant polypeptide region. In some embodiments, wherein the FKBP12 variant comprises an amino acid substitution at amino acid residue 36. In some embodiments, the FKBP12 variant polypeptide region is a FKBP12v36 polypeptide region. In some embodiments, the FRB variant polypeptide region is selected from the group consisting of KLW (T2098L) (FRBL), KTF (W2101F), and KLF (T2098L, W2101F). In some embodiments, a chimeric pro-apoptotic polypeptide encoded by a nucleic acid of the present embodiments is provided. In some embodiments, modified cells are provided that are transfected or transduced with a nucleic acid of the present embodiments. In some embodiments, the modified cells comprise a polynucleotide that encodes a chimeric antigen receptor or a recombinant TCR. In some embodiments, methods are provided of controlling survival of transplanted modified cells in a subject, comprising: a) transplanting modified cells of the present embodiments, wherein the modified cells comprise a nucleic acid comprising a promoter operably linked to a polynucleotide coding for a chimeric pro-apoptotic polypeptide, wherein the chimeric pro-apoptotic polypeptide comprises a) a pro-apoptotic polypeptide region; b) a FKBP12-Rapamycin binding domain (FRB) polypeptide or FRB variant polypeptide region; and c) a FKBP12 variant polypeptide region. of the present embodiments into the subject; and b) after (a), administering to the subject i) a first ligand that binds to the FRB or FRB variant polypeptide region of the chimeric pro-apoptotic polypeptide; or ii) a second ligand that binds to the FKBP12 variant polypeptide region of the chimeric pro-apoptotic polypeptide wherein the first ligand or the second ligand are administered in an amount effective to kill at least 30% of the modified cells that express the chimeric pro-apoptotic polypeptide.

[0024] Autologous T cells expressing chimeric antigen receptors (CARs) directed toward tumor-associated antigens (TAAs) have had a transformational effect in initial clinical trials on the treatment of certain types of leukemias (“liquid tumors”) and lymphomas with objective response (OR) rates approaching 90%. Despite their great clinical promise and the predictable accompanying enthusiasm, this success is tempered by the observed high level of on-target, off-tumor adverse events, typical of a cytokine release syndrome (CRS). To maintain the benefit of these revolutionary treatments while minimizing the risk, a tunable safety switch has been developed, in order to control the activity level of CAR-expressing T cells. An inducible costimulatory chimeric polypeptide allows for a sustained, modulated control of a chimeric antigen receptor (CAR) that is co-expressed in the cell. The ligand inducer activates the CAR-expressing cell by multimerizing the inducible chimeric signaling molecules, which, in turn, induces NF-κB and other intracellular signaling pathways, leading to the activation of the target cells, for example, a T cell, a tumor-infiltrating lymphocyte (TIL), a natural killer (NK) cell, or a natural killer T (NK-T) cell. In the absence of the ligand inducer, the T cell is quiescent, or has a basal level of activity.

[0025] At the second level of control, a “dimmer” switch may allow for continued cell therapy, while reducing or eliminating significant side effects by eliminating the therapeutic cells from the subject, as needed. This dimmer switch is dependent on a second ligand inducer. In some examples, where there is a need to rapidly eliminate the therapeutic cells, an appropriate dose of the second ligand inducer is administered in order to eliminate over 90% or 95% of the therapeutic cells from the patient. This second level of control may be “tunable,” that is, the level of removal of the therapeutic cells may be controlled so that it results in partial removal of the therapeutic cells. This second level of control may include, for example, a chimeric pro-apoptotic polypeptide.

[0026] In some examples, the chimeric apoptotic polypeptide comprises a binding site for rapamycin, or a rapamycin analog (rapalog); also present in the therapeutic cell is an inducible chimeric polypeptide that, upon induction by a ligand inducer, activates the therapeutic cell; in some examples, the inducible chimeric polypeptide provides costimulatory activity to the therapeutic cell. The CAR may be present on a separate polypeptide expressed in the cell. In other examples, the CAR may be present as part of the same polypeptide as the inducible chimeric polypeptide. Using this controllable first level, the need for continued therapy, or the need to stimulate therapy, may be balanced with the need to eliminate or reduce the level of negative side effects.

[0027] In some embodiments, a rapamycin analog, or “rapalog”, is administered to the patient, which then binds to both the caspase polypeptide and the chimeric antigen receptor, thus recruiting the caspase polypeptide to the location of the CAR, and aggregating the caspase polypeptide. Upon aggregation, the caspase polypeptide induces apoptosis. The amount of rapamycin or rapamycin analog administered to the patient may vary; if the removal of a lower level of cells by apoptosis is desired in order to reduce side effects and continue CAR therapy, a lower level of rapamycin or rapalog may be administered to the patient.

[0028] At the second level of therapeutic cell elimination, selective apoptosis may be induced in cells that express a chimeric Caspase-9 polypeptide fused to a dimeric ligand binding polypeptide, such as, for example, the AP1903-binding polypeptide FKBP12v36, by administering rimiducid (AP1903). In some examples, the Caspase-9 polypeptide includes amino acid substitutions that result in a lower level of basal apoptotic activity as part of the inducible chimeric polypeptide, than the wild type Caspase-9 polypeptide.

[0029] In some embodiments, the nucleic acid encoding the chimeric polypeptides of the present application further comprise a polynucleotide encoding a chimeric antigen receptor, a T cell receptor, or a T cell receptor-based chimeric antigen receptor. In some embodiments, the chimeric antigen receptor comprises (i) a transmembrane region, (ii) a T cell activation molecule, and (iii) an antigen recognition moiety. Also provided are modified cells transfected or transduced with a nucleic acid discussed herein

[0030] In some aspects of the present application, the cells are transduced or transfected with a viral vector. The viral vector may be, for example, but not limited to, a retroviral vector, such as, for example, but not limited to, a murine leukemia virus vector; an SFG vector; and adenoviral vector, or a lentiviral vector.

[0031] In some embodiments, the cell is isolated. In some embodiments, the cell is in a human subject. In some embodiments, the cell is transplanted in a human subject.

[0032] In some embodiments, personalized treatment is provided wherein the stage or level of the disease or condition is determined before administration of the multimeric ligand, before the administration of an additional dose of the multimeric ligand, or in determining method and dosage involved in the administration of the multimeric ligand. These methods may be used in any of the methods of any of the diseases or conditions of the present application. Where these methods of assessing the patient before administering the ligand are discussed in the context of graft versus host disease, it is understood that these methods may be similarly applied to the treatment of other conditions and diseases. Thus, for example, in some embodiments of the present application, the method comprises administering therapeutic cells to a patient, and further comprises identifying a presence or absence of a condition in the patient that requires the removal of transfected or transduced therapeutic cells from the patient; and administering a multimeric ligand that binds to the multimerizing region, maintaining a subsequent dosage of the multimeric ligand, or adjusting a subsequent dosage of the multimeric ligand to the patient based on the presence or absence of the condition identified in the patient. And, for example, in other embodiments of the present application, the method further comprises determining whether to administer an additional dose or additional doses of the multimeric ligand to the patient based upon the appearance of graft versus host disease symptoms in the patient. In some embodiments, the method further comprises identifying the presence, absence or stage of graft versus host disease in the patient, and administering a multimeric ligand that binds to the multimerizing region, maintaining a subsequent dosage of the multimeric ligand, or adjusting a subsequent dosage of the multimeric ligand to the patient based on the presence, absence or stage of the graft versus host disease identified in the patient. In some embodiments, the method further comprises identifying the presence, absence or stage of graft versus host disease in the patient, and determining whether a multimeric ligand that binds to the multimerizing region should be administered to the patient, or the dosage of the multimeric ligand subsequently administered to the patient is adjusted based on the presence, absence or stage of the graft versus host disease identified in the patient. In some embodiments, the method further comprises receiving information comprising the presence, absence or stage of graft versus host disease in the patient; and administering a multimeric ligand that binds to the multimerizing region, maintaining a subsequent dosage of the multimeric ligand, or adjusting a subsequent dosage of the multimeric ligand to the patient based on the presence, absence or stage of the graft versus host disease identified in the patient. In some embodiments, the method further comprises identifying the presence, absence or stage of graft versus host disease in the patient, and transmitting the presence, absence or stage of the graft versus host disease to a decision maker who administers a multimeric ligand that binds to the multimerizing region, maintains a subsequent dosage of the multimeric ligand, or adjusts a subsequent dosage of the multimeric ligand administered to the patient based on the presence, absence or stage of the graft versus host disease identified in the subject. In some embodiments, the method further comprises identifying the presence, absence or stage of graft versus host disease in the patient, and transmitting an indication to administer a multimeric ligand that binds to the multimeric binding region, maintain a subsequent dosage of the multimeric ligand or adjust a subsequent dosage of the multimeric ligand administered to the patient based on the presence, absence or stage of the graft versus host disease identified in the subject.

[0033] Also provided is a method for administering donor T cells to a human patient, comprising administering a transduced or transfected T cell of the present application to a human patient, wherein the cells are non-allodepleted human donor T cells.

[0034] In some embodiments, the therapeutic cells are administered to a subject having a non-malignant disorder, or where the subject has been diagnosed with a non-malignant disorder, such as, for example, a primary immune deficiency disorder (for example, but not limited to, Severe Combined Immune Deficiency (SCID), Combined Immune Deficiency (CID), Congenital T-cell Defect/Deficiency, Common Variable Immune Deficiency (CVID), Chronic Granulomatous Disease, IPEX (Immune deficiency, polyendocrinopathy, enteropathy, X-linked) or IPEX-like, Wiskott-Aldrich Syndrome, CD40 Ligand Deficiency, Leukocyte Adhesion Deficiency, DOCK 8 Deficiency, IL-10 Deficiency/IL-10 Receptor Deficiency, GATA 2 deficiency, X-linked lymphoproliferative disease (XLP), Cartilage Hair Hypoplasia, and the like), Hemophagocytosis Lymphohistiocytosis (HLH) or other hemophagocytic disorders, Inherited Marrow Failure Disorders (such as, for example, but not limited to, Shwachman Diamond Syndrome, Diamond Blackfan Anemia, Dyskeratosis Congenita, Fanconi Anemia, Congenital Neutropenia, and the like), Hemoglobinopathies (such as, for example, but not limited to, Sickle Cell Disease, Thalassemia, and the like), Metabolic Disorders (such as, for example, but not limited to, Mucopolysaccharidosis, Sphingolipidoses, and the like), or an Osteoclast disorder (such as, for example, but not limited to Osteopetrosis).

[0035] The therapeutic cells may be, for example, any cell administered to a patient for a desired therapeutic result. The cells may be, for example, T cells, natural killer cells, B cells, macrophages, peripheral blood cells, hematopoietic progenitor cells, bone marrow cells, or tumor cells. The modified Caspase-9 polypeptide can also be used to directly kill tumor cells. In one application, vectors comprising polynucleotides coding for the inducible modified Caspase-9 polypeptide would be injected into a tumor and after 10-24 hours (to permit protein expression), the ligand inducer, such as, for example, AP1903, would be administered to trigger apoptosis, causing the release of tumor antigens to the microenvironment. To further improve the tumor microenvironment to be more immunogenic, the treatment may be combined with one or more adjuvants (e.g., IL-12, TLRs, IDO inhibitors, etc.). In some embodiments, the cells may be delivered to treat a solid tumor, such as, for example, delivery of the cells to a tumor bed. In some embodiments, a polynucleotide encoding the chimeric Caspase-9 polypeptide may be administered as part of a vaccine, or by direct delivery to a tumor bed, resulting in expression of the chimeric Caspase-9 polypeptide in the tumor cells, followed by apoptosis of tumor cells following administration of the ligand inducer. Thus, also provided in some embodiments are nucleic acid vaccines, such as DNA vaccines, wherein the vaccine comprises a nucleic acid comprising a polynucleotide that encodes an inducible, or modified inducible Caspase-9 polypeptide of the present application. The vaccine may be administered to a subject, thereby transforming or transducing target cells in vivo. The ligand inducer is then administered following the methods of the present application.

[0036] In some embodiments, the modified Caspase-9 polypeptide is a truncated modified Caspase-9 polypeptide. In some embodiments, the modified Caspase-9 polypeptide lacks the Caspase recruitment domain. In some embodiments, the Caspase-9 polypeptide comprises the amino acid sequence of SEQ ID NO: 9, or a fragment thereof, or is encoded by the nucleotide sequence of SEQ ID NO: 8, or a fragment thereof.

[0037] In some embodiments, the methods further comprise administering a multimeric ligand that binds to the multimeric ligand binding region. In some embodiments, the multimeric ligand binding region is selected from the group consisting of FKBP, cyclophilin receptor, steroid receptor, tetracycline receptor, heavy chain antibody subunit, light chain antibody subunit, single chain antibodies comprised of heavy and light chain variable regions in tandem separated by a flexible linker domain, and mutated sequences thereof. In some embodiments, the multimeric ligand binding region is an FKBP12 region. In some embodiments, the multimeric ligand is an FK506 dimer or a dimeric FK506-like analog ligand. In some embodiments, the multimeric ligand is AP1903. In some embodiments, the number of therapeutic cells is reduced by from about 60% to 99%, about 70% to 95%, from 80% to 90% or about 90% or more after administration of the multimeric ligand. In some embodiments, after administration of the multimeric ligand, donor T cells survive in the patient that are able to expand and are reactive to viruses and fungi. In some embodiments, after administration of the multimeric ligand, donor T cells survive in the patient that are able to expand and are reactive to tumor cells in the patient.

[0038] In some embodiments, the suicide gene used in the second level of control is a caspase polypeptide, for example, Caspase 1, 2, 3, 4, 5, 6, 7, 8, 9, 10, 11, 12, 13, or 14. In certain embodiments, the caspase polypeptide is a Caspase-9 polypeptide. In certain embodiments, the Caspase-9 polypeptide comprises an amino acid sequence of a catalytically active (not catalytically dead) caspase variant polypeptide provided in Table 5 or 6 herein. In other embodiments, the Caspase-9 polypeptide consists of an amino acid sequence of a catalytically active (not catalytically dead) caspase variant polypeptide provided in Table 5 or 6 herein. In other embodiments, a caspase polypeptide may be used that has a lower basal activity in the absence of the ligand inducer. For example, when included as part of a chimeric inducible caspase polypeptide, certain modified Caspase-9 polypeptides may have lower basal activity compared to wild type Caspase-9 in the chimeric construct. For example, the modified Caspase-9 polypeptide may comprise an amino acid sequence having at least 90% sequence identity to SEQ ID NO: 9, and may comprise at least one amino acid substitution.

[0039] Certain embodiments are described further in the following description, examples, claims and drawings.

### BRIEF DESCRIPTION OF THE DRAWINGS

[0040] The drawings illustrate embodiments of the technology and are not limiting. For clarity and ease of illustration, the drawings are not made to scale and, in some instances, various aspects may be shown exaggerated or enlarged to facilitate an understanding of particular embodiments.

[0041] FIG. 1A illustrates various iCasp9 expression vectors as discussed herein. FIG. 1B illustrates a representative western blot of full length and truncated Caspase-9 protein produced by the expression vectors shown in FIG. 1A. FIG. 1A discloses “GCCACC” as SEQ ID NO: 923 and “Ser-Gly-Gly-Gly-Ser” as SEQ ID NO: 924.

[0042] FIG. 2 is a schematic of the interaction of the suicide gene product and the CID to cause apoptosis.

[0043] FIG. 3 is a schematic depicting a two-tiered regulation of apoptosis. The left section depicts rapalog-mediated recruitment of an inducible caspase polypeptide to FRBI-modified CAR. The right section depicts a rimiducid (AP1903)-mediated inducible caspase polypeptide.

[0044] FIG. 4 is a plasmid map of a vector encoding FRB_{L}-modified CD19-MC-CAR and inducible Caspase-9. pSFG-iCasp9-2A-CD19-Q-CD28stm-MCz-FRB_{L}2.

[0045] FIG. 5 is a plasmid map of a vector encoding FRB_{L}-modified Her2-MC-CAR and an inducible Caspase-9 polypeptide. pSFG-iCasp9-2A-aHer2-Q_CD28stm-mMCz-FRB_{L}2.

[0046] FIGS. 6A and 6B provide the results of an assay of two-tiered activation of apoptosis. FIG. 6A shows recruitment of an inducible Caspase-9 polypeptide (iC9) with rapamycin, leading to more gradual apoptosis titration. FIG. 6B shows complete apoptosis using rimiducid (AP1903).

[0047] FIG. 7 is a plasmid map of the pBP0545 vector, pBP0545.pSFG.iCasp9.2A.Her2scFv.Q.CD8stm.MC-zeta.

[0048] FIGS. 8A-8C illustrate that FRB or FKBP12-based scaffolds can multimerize signaling domains. FIG. 8A. Homodimerization of a signaling domain (red stick), like Caspase-9, can be achieved via a heterodimer that binds to the FRB-fused signaling domain on one side and FKBP12-fused domain on the other. FIG. 8B. Dimerization or multimerization of a signaling domain via 2 (left) or more (right) tandem copies of FRB (chevron). The scaffold can contain subcellular targeting sequences to localize proteins to the plasma membrane (as depicted), the nucleus or organelles. FIG. 8C. Similar to FIG. 8B, but domain polarity is reversed.

[0049] FIGS. 9A-9C provide schematics of iMC-mediated scaffolding of FRB_{L}2. Caspase-9. FIG. 9A. In the presence of a heterodimer drug, such as a rapamycin, the FRB_{L}2-linked Caspase-9 binds with and clusters the FKBP-modified MyD88/CD40 (MC) signaling molecule. This clustering effect results in dimerization of FRB_{L}2. Caspase-9 and subsequent induction of cellular death via the apoptotic pathway. FIG. 9B. Similar to panel 9A, however the FKBP and FRB domains have been switched in relation to associated Caspase-9 and MC domains. The clustering effect still occurs in the presence of heterodimer drug. FIG. 9C. Similar to panel 9A; however there is only one FKBP domain attached to MC. Therefore, in the presence of heterodimer, Caspase-9 is no longer capable of being clustered and therefore apoptosis is not induced.

[0050] FIG. 10A-10E provide schematics of a rapalog-induced, FRB scaffold-based inducible Caspase-9 polypeptide. FIG. 10A: Rimiducid homodimerizes FKBPv-linked Caspase-9, resulting in dimerization and activation of Caspase-9 with subsequent induction of cellular death via the apoptotic pathway. FIG. 10B: Rapalogs heterodimerize FKBPv-linked Caspase-9 with FRB-linked Caspase-9, resulting in dimerization of Caspase-9 and cell death. FIG. 100, FIG. 10D, FIG. 10E are schematics illustrating that in the presence of a heterodimer drug, such as a rapalog, 2 or more FRB_{L} domains act as a scaffold to recruit binding of FKBPv-linked Caspase-9, leading to dimerization or oligomerization of Caspase-9 and cell death.

[0051] FIG. 11A is a schematic and FIG. 11B is a line graph depicting activation of apoptosis by dimerization of a chimeric FRB-Caspase-9 polypeptide and a chimeric FKBP-Caspase-9 polypeptide (FRB_{L}-ΔCaspase-9 and FKBPv-ΔCaspase-9) with rapamycin. FIG. 11A. Schematic representation of dimerization of FRB and FKBP12 with rapamycin to bring together fused Caspase-9 signaling domains and activation of apoptosis. FIG. 11B. Reporter assays were performed in HEK-293T cells transfected with the constitutive SRα-SEAP reporter (pBP046, 1 μg), a fusion of FRB_{L} (L2098) and human ΔCaspase-9 (pBP0463, 2 μg) and a fusion of FKBP12 with ΔCaspase-9 (pBP0044, 2 μg).

[0052] FIG. 12A is a schematic and FIGS. 12B and 12C are line graphs depicting assembly of FKBP-Caspase-9 on a FRB-based scaffold. FIG. 12A: Schematic of iterated FRB domains to provide scaffolds for rapamycin (or rapalog)-mediated multimerization of an FKBP12-Caspase-9 fusion protein. FIG. 12B: Cultures of HEK-293 cells were transfected (via Genejuice, Novagen) with the constitutive SRα-SEAP reporter plasmid (pBP0046, 1 μg), a fusion of human FKBP12 with human Caspase-9 (pBP0044, 2 μg) and FRB-encoding expression constructs, containing four copies of FRB_{L} (pBP0725, 2 μg) or control vectors encoding zero or one copy of FRB_{L}. 24 hours post-transfection, cells were distributed into 96-well plates and rapamycin or a derivative rapalog, C7-isopropoxyrapamycin, with specificity for the mutant FRB_{L} (Liberles et al, 1997) were administered in triplicate wells. Placental SEAP reporter activity was determined 24 hours post-drug administration. FIG. 12C: Reporter assays were performed as in (B), but FRB-scaffolds were expressed from constructs encoding iterated FRB_{L} domains with an amino-terminal myristoylation-targeting sequence and two (pBP0465) or four copies (pBP0721) of the FRB_{L} domain.

[0053] FIG. 13A is a schematic and FIG. 13B is a line graph depicting assembly of FRB-ΔCaspase-9 on an FKBP scaffold. FIG. 13A. Schematic of iterated FKBP12 domains to produce scaffolds for assembly of rapamycin (or rapalog)-mediated multimerization of FRB-ΔCaspase-9 fusion protein, leading to apoptosis. FIG. 13B. Reporter assays were performed as in FIGS. 12B and C with cultures of HEK-293T cells transfected with the constitutive SRα-SEAP reporter (pBP046, 1 μg), a fusion of FRB_{L} (L2098) and CARD domain-deleted human ΔCaspase-9 (pBP0463, 2 μg) and FKBP expression constructs containing four tandem copies of FKBP12 (pBP722, 2 μg) or a control vector with one copy of FKBP (pS-SF1E).

[0054] FIGS. 14A-14B provide line graphs showing that heterodimerization of FRB_{L} scaffold with iCaspase9 induces cell death. Primary T cells from three different donors (307, 582, 584) were transduced with pBP0220-pSFG-iC9.T2A-ΔCD19, pBP0756-pSFG-iC9.T2A-ΔCD19.P2A-FRB_{L}, pBP0755-pSFG-iC9.T2A-ΔCD19.P2A-FRB_{L}2, or pBP0757-pSFG-iC9.T2A-ΔCD19.P2A-FRB_{L}3, containing iC9, CD19 marker, and 0-3 tandem copies of FRB_{L}, respectively. T Cells were plated with varying concentrations of rapamycin and after 24 and 48 hours cell aliquots were harvested, stained with APC-CD19 antibody and analyzed by flow cytometry. Cells were initially gated on live lymphocytes by FSC vs SSC. Lymphocytes were then plotted as a CD19 histogram and subgated for high, medium and low expression within the CD19⁺ gate. Line graphs represent the relative percentage of the total cell population that express high levels of CD19, normalized to the no “0” drug control. All data points were done in duplicates. FIG. 14A: donor 307, 24 hr; FIG. 14B: donor 582, 24 hr; FIG. 14C: donor 584 24 hr; FIG. 14D: donor 582 48 hr; FIG. 14E: donor 584 48 hr.

[0055] FIGS. 15A-15C provide line graphs and a schematic showing that rapamycin induces iC9 killing in the presence of tandem FRB_{L} domains. HEK-293 cells were transfected with 1 μg of SRα-SEAP constitutive reporter plasmid along with either negative (Neg) control, eGFP (pBP0047), iC9 (iC9/pBP0044) alone, or iC9 along with iMC.FRB_{L} (pBP0655)+anti-HER2.CAR.Fpk2 (pBP0488) or iMC.FRB_{L}2 (pBP0498)+anti-HER2.CAR.Fpk2. Cells were then plated with half-log dilutions of rimiducid or rapamycin and assayed for SEAP as previously described. Diminution of SEAP activity correlates with cell elimination. Schematic represents one possible rapamycin-mediated complex of signaling domains, which lead to Caspase-9 clustering and apoptosis. FIG. 15A: rimiducid; FIG. 15B: rapamycin; FIG. 15C: schematic.

[0056] FIGS. 16A and 16B are line graphs showing that tandem FKBP scaffold mediates FRB_{L}2. Caspase activation in the presence of rapalogs. FIG. 16A. HEK-293 cells were transfected with 1 μg each of SRα-SEAP reporter plasmid, Δmyr.iMC.2A-anti-CD19.CAR.CD3ζ (pBP0608), and FRB_{L}2. Caspase-9 (pBP0467). After 24 hours, transfected cells were harvested and treated with varying concentrations of either rimiducid, rapamycin, or rapalog, C7-isopropoxy (IsoP)-rapamycin. After ON incubation, cell supernatants were assayed for SEAP activity, as previously described. FIG. 16B. Similar to the experiment described in (FIG. 16A), except that cells were transfected with a membrane-localized (myristoylated) iMC.2A-CD19.CAR.CD3ζ (pBP0609), instead of non-myristoylated ΔmyriMC.2A-CD19.CAR.CD3ζ (pBP0608).

[0057] FIGS. 17A-17E provides line graphs and the results of FACs analysis showing that the iMC “switch”, FKBP2.MyD88.CD40, creates a scaffold for FRB_{L}2. Caspase9 in the presence of rapamycin, inducing cell death. FIG. 17A. Primary T cells (2 donors) were transduced with γ-RV, SFG-ΔMyr.iMC.2A-CD19 (from pBP0606) and SFG-FRB_{L}2. Caspase9.2A-Q.8stm.zeta (from pBP0668). Cells were plated with 5-fold dilutions of rapamycin. After 24 hours, cells were harvested and analyzed by flow cytometry for expression of iMC (anti-CD19-APC), Caspase-9 (anti-CD34-PE), and T cell identity (anti-CD3-PerCPCy5.5). Cells were initially gated for lymphocyte morphology by FSC vs SSC, followed by CD3 expression (˜99% of the lymphocytes). CD3⁺ lymphocytes were plotted for CD19 (ΔmyriMC.2A-CD19) vs CD34 (FRB_{L}2. Caspase9.2A-Q.8stm.zeta) expression.

[0058] To normalize gated populations, percentages of CD34⁺CD19⁺ cells were divided by percent CD19⁺CD34⁻ cells within each sample as an internal control. Those values were then normalized to drug free wells for each transduction which were set at 100%. Similar analysis was applied to the Hi-, Med-, and Lo-expressing cells within the CD34⁺CD19⁺ gate. FIG. 17B. Representative example of how cells were gated for Hi, Med, and Lo expression. FIG. 17C. Representative scatter plots of final CD34 vs CD19 gates. As rapamycin increased, % CD34⁺CD19⁺ cells decreased, indicating elimination of cells. FIG. 17D and FIG. 17E. T cells from a single donor were transduced with ΔMyriMC.2A-CD19 (pBP0606) or FRB_{L}2. Caspase9.2A-Q.8stm.zeta (pBP0668). Cells were plated in IL-2-containing media along with varying amounts of rapamycin for 24 or 48 hrs. Cells were then harvested and analyzed, as above.

[0059] FIG. 18 Plasmid map of pBP0044: pSH1-iCaspase9 wt

[0060] FIG. 19 Plasmid map of pBP0463--pSH1-Fpk-Fpk′LS.Fpk″.Fpk′″.LS.HA

[0061] FIG. 20 Plasmid map of pBP0725--pSH1-FRBI.FRBI′.LS.FRBI″.FRBI′″

[0062] FIG. 21 Plasmid map of pBP0465--pSH1-M-FRBI.FRBI′.LS.HA

[0063] FIG. 22 Plasmid map of pBP0721--pSH1-M-FRBI.FRBI′.LS.FRBI″.FRBI′″HA

[0064] FIG. 23 Plasmid map of pBP0722--pSH1-Fpk-Fpk′.LS.Fpk″.Fpk′″.LS.HA

[0065] FIG. 24 Plasmid map of pBP0220--pSFG-iC9.T2A-ΔCD19

[0066] FIG. 25 Plasmid map of pBP0756--pSFG-iC9.T2A-dCD19.P2A-FRBI

[0067] FIG. 26 Plasmid map of pBP0755--pSFG-iC9.T2A-dCD19.P2A-FRBI2

[0068] FIG. 27 Plasmid map of pBP0757--pSFG-iC9.T2A-dCD19.P2A-FRBI3

[0069] FIG. 28 Plasmid map of pBP0655--pSFG-ΔMyr.FRBI.MC.2A-ΔCD19

[0070] FIG. 29 Plasmid map of pBP0498--pSFG-ΔMyriMC.FRB12.P2A-ΔCD19

[0071] FIG. 30 Plasmid map of pBP0488--pSFG-aHER2.Q.8stm.CD3zeta.Fpk2

[0072] FIG. 31 Plasmid map of pBP0467-pSH1-FRBI′. FRBI.LS.ΔCaspase9

[0073] FIG. 32 Plasmid map of pBP0606--pSFG-k-ΔMyr.iMC.2A-ΔCD19

[0074] FIG. 33 Plasmid map of pBP0607--pSFG-k-iMC.2A-ΔCD19

[0075] FIG. 34 Plasmid map of pBP0668--pSFG-FRBIx2.Caspase9.2A-Q.8stm.CD3zeta

[0076] FIG. 35 Plasmid map of pBP0608--pSFG-ΔMyriMC.2A-ΔCD19.Q.8stm.CD3zeta

[0077] FIG. 36 Plasmid map of pBP0609: pSFG-iMC.2A-ΔCD19.Q.8stm.CD3zeta

[0078] FIG. 37A provides a schematic of rimiducid binding to two copies of a chimeric Caspase-9 polypeptide, each having a FKBP12 multimerizing region. FIG. 37B provides a schematic of rapamycin binding to two chimeric Caspase-9 polypeptides, one of which has a FKBP12 multimerizing region and the other which has a FRB multimerizing region. FIG. 37C provides a graph of assay results using these chimeric polypeptides.

[0079] FIG. 38A provides a schematic of rapamycin or rapalog binding to two chimeric Caspase-9 polypeptides, one of which has a FKBP12v36 multimerizing region and the other which has a FRB variant (FRB_{L}) multimerizing region. FIG. 38B provides a graph of assay results using this chimeric polypeptide.

[0080] FIG. 39A provides a schematic of rimiducid binding to two chimeric Caspase-9 polypeptides, each of which has a FKBP12v36 multimerizing region, and rapamycin binding to only one chimeric Caspase-9 polypeptide having a FKBP12v36 multimerizing region. FIG. 39B provides a graph of assay results comparing the effects of rimiducid and rapamycin.

[0081] FIG. 40A provides a schematic of rimiducid binding to two chimeric Caspase-9 polypeptides, each of which has a FKBP12v36 multimerizing region, and rapamycin binding to only one chimeric Caspase-9 polypeptide having a FKBP12v36 multimerizing region in the presence of a FRB multimerization polypeptide. FIG. 40B provides a graph of assay results using these polypeptides, comparing the effects of rimiducid and rapamycin.

[0082] FIG. 41 provides a plasmid map of pBP0463.pFRBI.LS.dCasp9.T2A.

[0083] FIG. 42 provides a plasmid map of pBP044-pSH1.iCasp9WT.

[0084] FIGS. 43A-43C Schematics of FwtFRBC9/MC.FvFv containing iFwtFRBC9 or iFRBFwtC9 (collectively, iRC9). In this version of the rapamycin inducible chimeric pro-apoptotic polypeptide, tandem FKBP.FRB (or FRB.FKBP) domains are fused to Δcaspase-9. Rapamycin or rapalogs can induce: 1) scaffold-induced dimerization of FKBP.FRB.ΔC9 (or FRB.FKBP.ΔC9) via the two FKBP domains fused to MC; 2) direct dimerization of FKBP.FRB.ΔC9 (or FRB.FKBP.ΔC9) to induce multimerization of the engineered caspase-9 fusion proteins.

[0085] FIGS. 44A-44C Expression profile of iMC+CARζ-T, i9+CARζ+MC, and FwtFRBC9/MC.FvFv T cells. PBMCs from four different donors were activated and transduced with iMC+CARζ-T (608), i9+CARζ+MC (844), and FwtFRBC9/MC.FvFv (1300)-containing vectors. For a vector schematic see FIG. 48. (A) Five days post-transduction, T cell lysates were subjected to Western blot analysis with antibodies to MyD88, caspase-9, and β-actin (which serves to demonstrate equal protein loading in all lanes). Note that iRC9 migrates the same as the endogenous caspase-9 and the added strength of the band denotes the level of the iRC9. (B) CAR expression were analyzed 4, 7, 12, 21, and 29 days post-transduction with anti-CD34-PE and anti-CD3-PerCPcy5 antibodies. (C) T cell viability from cells growing in culture was assessed 3, 5, 12, 21, and 29 days post-transduction using a Cellometer and AOPI viability dye.

[0086] FIGS. 45A-45C Rapamycin induces robust apoptosis activation in FwtFRBC9/MC.FvFv T cells. PBMCs from four different donors were activated and transduced with iMC+CARζ-T (608), i9+CARζ+MC (844), and FwtFRBC9/MC.FvFv (1300)-containing vectors. Five days post-transduction, T cells were seeded onto 96-well plates±rimiducid, ±rapamycin, and in the presence of 2 μM caspase 3/7 green reagent. (A) Plates were placed inside the IncuCyte to monitor green fluorescence over time, reflecting cleaved caspase 3/7 reagent. (B) After 48 hours, cells were stained with anti-CD34-PE (FL2) PI (FL4), and Annexin V-PacBlue (FL9), and cleaved caspase 3/7 was detected in the FL1 channel on a Galios cytometer. (C) Culture supernatant was also collected 48 hours after plating, and IL-2 and IL-6 cytokine production was analyzed by ELISA.

[0087] FIGS. 46a-46C Q-LEHD-OPh (SEQ ID NO: 2364) efficiently inhibits caspase activation induced by iC9 and iRC9. PBMCs were activated and transduced with i9+CARζ+MC (844) and FwtFRBC9/MC.FvFv (1300) vectors. Seven days post-transduction, T cells were seeded on 96-well plates (A) with increasing rimiducid/rapamycin concentration, (B) with increasing Q-LEHD-OPh (SEQ ID NO: 2364) concentration, and (C) with 20 nM rimiducid/rapamycin and increasing Q-LEHD-OPh (SEQ ID NO: 2364) concentration. Additionally, 2 μM caspase 3/7 green reagent was added to monitor caspase cleavage by IncuCyte.

[0088] FIGS. 47A-47D FRB_{L} and caspase-9 N405Q mutants reduce iRC9 activity. PBMCs were activated and transduced with plasmids 1300, 1308, 1316 and 1317. Five days post-transduction, T cells were seeded onto 96-well plates with 0 (A), 0.8 (B), 4 (C), and 20 nM (D) rapamycin. 2 μM caspase 3/7 green reagent was included to monitor caspase activation over time in the IncuCyte.

[0089] FIGS. 48A-48D iRC9 is a potent effector of rapamycin-induced apoptosis. (A) Schematic representation of iMC+CARζ-T, i9+CARζ+MC, iFRBC9 and MC.FvFv, and FwtFRBC9/MC.FvFv constructs. (B-D) Activated T cells were transduced with retrovirus encoding iMC+CARζ-T, i9+CARζ+MC, iFRBC9 and MC.FvFv, or FwtFRBC9/MC.FvFv and treated with no drug, 20 nM rapamycin or 20 nM rimiducid and cultured in the presence of 2.5 μM caspase 3/7 green reagent. The 96-well microplate was placed inside the IncuCyte to monitor activated caspase activity (green fluorescence) for 48 hours.

[0090] FIGS. 49A-49D iRC9 quickly and efficiently eliminates CAR-T cells in vivo. (A and B) NSG mice were injected i.v. with 10⁷ iMC+CARζ-T, i9+CARζ+MC, iFRBC9 and MC.FvFv or FwtFRBC9/MC.FvFv T cells co-transduced with GFP-Ffluc per mouse. Bioluminescence of CAR T cells was assessed 18 hours (−18 h) prior to drug treatment, immediately before drug treatment (0 h) and 4.5 h, 18 h, 27 h, and 45 h post-drug treatment. For mice receiving i9+CARζ+MC T cell injection, 5 mg/kg rimiducid was injected i.p. per mouse. For mice receiving iMC+CARζ-T, (iFRBC9 and MC.FvFv) and FwtFRBC9 MC.FvFv T cells, 10 mg/kg rapamycin was injected i.p. per mouse. At 45 h post-drug treatment, mice were euthanized and (C) blood and (D) spleen were collected for flow cytometry analysis with antibodies to hCD3, hCD34, and mCD45.

[0091] FIGS. 50A-50D The on- and off-switches in FwtFRBC9/MC.FvFv are efficiently controlled by rimiducid and rapamycin, respectively. PBMCs from donor 920 were activated and co-transduced with GFP-Ffluc and iMC+CARζ-T (189), i9+CARζ+MC (873), or FwtFRBC9/MC.FvFv (1308)-encoding vectors. Seven days post-transduction, T cells were seeded onto 96-well plates at 1:2 and 1:5 E:T ratios with HPAC-RFP cells in the presence of 0, 2, or 10 nM rimiducid and placed in the IncuCyte to monitor the kinetics of T cell-GFP and HPAC-RFP growth. (A & B) Two days post-seeding, culture supernatants were analyzed for IL-2, IL-6, and IFN-γ production by ELISA. At day 7, 10 nM rimiducid was added to i9+CARζ+MC culture and 10 nM rapamycin was added to GFP, iMC+CARζ-T and FwtFRBC9/MC.FvFv cultures followed by monitoring by IncuCyte until day 8. Numbers of HPAC-RFP and T cell-GFP at the E:T 1:2 ratio was analyzed using the basic analyzer software for the IncuCyte at day 7 (Ci) and day 8 with 0 nM suicide drug (Cii) and 10 nM suicide drug (Ciii). Similar analysis was also performed at the 1:5 E:T ratio (D). (Note: the y-axis in Ci and Di are at log-scale).

[0092] FIGS. 51A-51E iRC9 activates apoptosis via direct self-dimerization independent of scaffold-induced dimerization in FwtFRBC9/MC.FvFv. PBMCs from donor 920 were activated and transduced with various vectors de in (A). (B) Protein expression of the CAR T cells was analyzed by Western blot using antibodies to hMyD88, hCaspase-9 and β-actin. (C-D) Five days post-transduction, T cells were seeded on 96-well plates with increasing rapamycin concentrations. Additionally, 2 μM caspase 3/7 green reagent was added to monitor caspase cleavage by IncuCyte. Line graphs depict caspase activation over 24 hours post-rapamycin treatment of MC variants (C) and FRB.FKBP.ΔC9 versus FKBP.FRB.ΔC9 iRC9(D). (E) Seven days post-transduction, T cells were seeded onto 96-well plates with increasing rimiducid concentrations and IL-2 and IL-6 secretion were quantified by ELISA 48 hours post-rimiducid treatment.

[0093] FIGS. 52A-52B Relatively high (>100 nM) rimiducid concentration is required to activate iRC9. 293 cells were seeded at 300,000 cells/well in a 6-well plate and allowed to grow for 2 days. After 48 h, cells were transfected with 1 μg of experimental plasmids. Cells were harvested 48 h after transfection and diluted 2.5× their original volume. (A) For the Incucyte/casp3/7 assay, 50 μl of cells were plated per well including either rimiducid or rapamycin drug and caspase 3/7 green reagent (2.5 μM final concentration). (B) For the SEAP assays, 100 μl of cells were plated in a 96-well plate with (half-log) rimiducid (or rapamycin) drug dilutions and ˜18 h after drug exposure, plates were heat-inactivated before substrate (4-MUP) addition.

[0094] FIGS. 53A-53B Schematic of MC-Rap, a CAR-costimulation strategy inducible with rapamycin or rapalogs. In this version of an inducible costimulatory switch, tandem FKBP.FRB (or FRB.FKBP) domains are fused to MyD88-CD40 (MC) (right). Rapamycin or rapalogs can induce direct dimerization of FKBP in MC-FKBP-FRB (or MC-FRB-FKBP) with FRB in a second molecule of MC-FKBP-FRB to induce multimerization of the engineered MC fusion proteins. Note that FRB can be present as the wild-type or as a mutant such as FRB_{L} inducible with rapalogs that have reduced affinity for mTOR. This strategy is contrasted with homodimerization directed by rimiducid and FKBP_{V36} in the iMC+CARζ platform (left).

[0095] FIGS. 54A-54B Induction of MC costimulatory activity with a rapalog and a MC-Rap-CAR. Human PBMCs were activated and transduced with iMC+CARζ constructs (BP0774 and BP1433), MC-rap-CAR (BP1440) or an noninducible MC only construct (BP1151). Cells were allowed to rest for 6 days then aliquots were stimulated with rimiducid or the rapalog C7-dimethoxy-7-isobutyloxyrapamycin. Supernatant media was harvested 24 hours later and the amount of secreted IL-6 determined by ELISA as an indicator of MC activity. MC activity in iMC+CARζ-T cells is stimulated strongly with rimiducid and not with the rapalog. MC activity in MC-rap-T cells is not stimulated with rimiducid because FKBP12 in pBP1440 is the wild-type rather than the rimiducid sensitive allele V36. MC-Rap activity is instead strongly responsive to isobutyloxyrapamycin to a degree similar to the iMC+CARζ-Ts with rimiducid.

[0096] FIGS. 55A-55B Protein expression of MC from iMC+CAR. Human PBMCs were activated and transduced with iMC+CARζ constructs (BP0774, BP1433 and BP1439), MC-rap-CAR (BP1440) or an noninducible MC only constructs (BP1151 oriented at the 5′ end of the retrovirus and 1414 oriented 3′ relative to the CAR). Cells were expanded for 2 weeks then extracts were prepared for SDS-PAGE. Western blots were probed with antibodies to MyD88. The MC-FKBP-FRB fusion protein was expressed at a similar level to the MC-FKBP_{V} fusions from iMC+CARζ constructs.

[0097] FIGS. 56A-56B Responsiveness of MC-rap to dosage of rapamycin and rapamycin analog. 293T cells were transfected with 1 μg of reporter construct NF-κB SeAP and 4 μg of the iMC+CARζ construct pBP0774 or the MC-rap-CAR construct pBP1440 using the GeneJuice protocol (Novagen). 24 hours post transfection cells were split to 96 well plates and incubated with increasing concentrations of rimiducid, rapamycin or isobutyloxyrapamycin. After 24 hours of further incubation SeAP activity was determined from cell supernatants. NF-κB reporter activity was stimulated with a subnanomolar EC50 with both the rapalog and rapamycin while up to 50 nM rimiducid could not direct MC-rap dimerization.

[0098] FIGS. 57A-57B Schematic of MC-Rap, a CAR-costimulation strategy inducible with rapamycin or rapalogs. In FwtFRBC9/MC.FvFv (left) tandem FKBP.FRB (or FRB.FKBP) domains are fused to Caspase 9 and tandem Fv moieties are fused to MC. Caspase 9 can be activated by homodimerization through rapamycin directed FRB and wild-type FKBP ligation or by scaffolding with iMC. Rimiducid dimerizes FKBP_{V36} moieties to activate MC. FRBFwtMC/FvC9 (right) uses rapamycin or rapalogs can to induce MC-rap while iC9 induced by rimiducid for a cell suicide switch.

[0099] FIGS. 58A-58C FRBFwtMC/FvC9 can effectively control tumor growth but is abrogated by activation of iC9 with rimiducid. PBMCs from donor 676 were activated and transduced with a CD19 directed i9+CARζ+MC (BP0844), FRBFwtMC/FvC9 (BP1460) or FwtFRBC9/MC.FvFv (BP1300). Seven days post-transduction, T cells were seeded onto 24-well plates at 1:5 E:T ratios with Raji-GFP cells in the presence of 2 nM rimiducid, 2 nM isobutyloxyrapamycin or 2 nM rapamycin. After seven days of incubation the live cells were analyzed for the proportion of GFP labeled tumor cells (left) and for the proportion of total T cells (CD3⁺, right) and transduced CAR-T cells (CD34, not shown). Rimiducid caused cell death of CAR-T cells with i9+CARζ+MC, or FRBFwtMC/FvC9 and tumor cells dominate the culture while rapamycin or isobutyloxyrapamycin cause cell death with FwtFRBC9/MC.FvFv.

[0100] FIG. 59 Schematic of plasmid pBP1300--pSFG-FKBP.FRB.ΔC9.T2A-αCD19.Q.CD8stm.ζ.P2A-iMC

[0101] FIG. 60 Schematic of plasmid pBP1308--pSFG-FKBP.FRB.ΔC9.T2A-αPSCA.Q.CD8stm.ζ.P2A-iMC

[0102] FIG. 61 Schematic of plasmid pBP1310--pSFG.FRB.FKBP.ΔC9.T2A-ΔCD19

[0103] FIG. 62 Schematic of plasmid pBP1311--pSFG.FKBP.FRB.ΔC9.T2A-ΔCD19

[0104] FIG. 63 Schematic of plasmid pBP1316--pSFG-FKBP.FRB_{L}.ΔC9.T2A-αPSCA.Q.CD8stm.ζ.P2A-iMC

[0105] FIG. 64 Schematic of plasmid pBP1317--pSFG-FKBP.FRB.ΔC9_{Q}.T2A-αPSCA.Q.CD8stm.ζ.P2A-iMC

[0106] FIG. 65 Schematic of plasmid pBP1319--pSFG-FKBP.FRB.ΔC9.T2A-αPSCA.Q.CD8stm.ζ.P2A-MC.FKBP_{V}

[0107] FIG. 66 Schematic of plasmid pBP1320--pSFG-FKBP.FRB.ΔC9.T2A-αPSCA.Q.CD8stm.ζ.P2A-MC

[0108] FIG. 67 Schematic of plasmid pBP1321--pSFG-FKBP.FRB.ΔC9.T2A-αPSCA.Q.CD8stm.ζ.P2A-MC.FKBP_{V}.FKBP

[0109] FIG. 68A provides a graph of drug-dependent CAR-T cell killing of tumor cells. FIG. 68B provides schematics of of inducible MyD88-CD40 polyeptides.

[0110] FIG. 69A provides a schematic representation of retroviral vectors that express inducible MyD88-CD40 polypeptides. FIG. 69B provides a bar graph of results of a reporter assay of costimulatory signaling. FIG. 69C provides a bar graph of CAR-T cell cytokine secretion. FIG. 69D provides a graph of a CAR-T cell killing assay.

[0111] FIG. 70A provides a schematic representation of retroviral vectors that express inducible MyD88-CD40 polypeptides. FIG. 70B provides a graph of a reporter assay of costimulatory signaling. FIG. 70C provides a graph of a PSCA-CAR-T cell killing assay. FIG. 70D provides a graph of a PSCA CAR-T cell killing assay. FIG. 70E provides a graph of a HER2-CAR-T cell killing assay. FIG. 70F provides a graph of a HER2-CAR-T cell killing assay. FIG. 70G provides a graph of a HER2-CAR-T cell killing assay.

[0112] FIG. 71A provides a graph of apoptosis activity directed by inducible Caspase-9 in the presence of rimiducid. FIG. 71B provides a graph of apoptosis activity directed by inducible Caspase-9 in the presence of C7-isobutyloxyrapamycin.

[0113] FIG. 72A provides a schematic of polypeptides expressed on a single vector, including a CAR polypeptide, a iRC9 polypeptide, and an iMC polypeptide. FIG. 72B provides schematics of the polypeptides expressed on two separate vectors.

[0114] FIG. 73A provides a schematic of inducible Caspase 9 retroviral constructs. FIG. 73B provides data showing fluorescent conversion of cells that express Caspase 9 in the presence of rapamycin. FIG. 73C provides a graph of relative apoptosis activity of FIG. 73B. FIG. 73D provides a Western blot of Caspase-9 transgene expression in T cells.

[0115] FIG. 74A provides a graph of IL-6 secretion in the presence of rimiducid. FIG. 74B provides a graph of IL-2 secretion in the presence of rimiducid. FIG. 74C provides a graph of IFN-γ secretion in the presence of rimiducid. FIG. 74D provides a graph of CAR-T cell killing in the presence of rimiducid.

[0116] FIG. 74E provides a Western blot of expression of iMC and iRC9.

[0117] FIG. 75A provides cell sorting results from non-transduced T cells, or T cells transduced with retroviruses that encode iRC9, iMC, and CAR, as indicated. FIG. 75B provides a graph of the results of FIG. 75A. FIG. 75C provides cell sorting results of an apoptosis assay. FIG. 75D provides a graphical representation of an apopotosis assay.

[0118] FIG. 76A provides micrographs of tumor bearing animals determined by bioluminescence imaging.

[0119] FIG. 76B provides graphs of average tumor growth. FIG. 76C provides graphs of human T cells in spleens at termination. FIG. 76D provides graphs of vector copy number.

[0120] FIG. 77A provides micrographs of tumor-bearing animals determined by bioluminescence imaging.

[0121] FIG. 77B provides graphs of average radiance. FIG. 77C provides a graph of a Kaplan-Meier analysis from FIG. 77A. FIG. 77D provides a representative FACS analysis at termination.

[0122] FIG. 78A provides micrographs of tumor-bearing animals determined by bioluminescence imaging.

[0123] FIG. 78B provides graphical representations of the average calculated radiance from FIG. 78A.

[0124] FIG. 78C provides a graph of human T cell counts in mouse spleens.

[0125] FIG. 79A provides micrographs of tumor-bearing animals determined by bioluminescence imaging.

[0126] FIG. 79B provides a graphical representation of the average calculated radiance from FIG. 79A.

[0127] FIG. 79C provides a graph of the number of human T cells in mouse spleens at termination. FIG. 79D provides graphs of vector copy number from DNA derived from mouse spleens.

[0128] FIG. 80 provides a plasmid map of pBP1151--pSFG--MC-T2A-αCD19.Q.CD8stm.ζ

[0129] FIG. 81 provides a plasmid map of pBP1152--pSFG--MC-T2A-αCD19.Q.CD8stm.ζ

[0130] FIG. 82 provides a plasmid map of pBP1414--pSFG-αCD19.Q.CD8stm.ζ-P2A-MC

[0131] FIG. 83 provides a plasmid map of pBP1414--pSFG-αCD19.Q.CD8stm.ζ-P2A-MC

[0132] FIG. 84 provides a plasmid map of pBP1433--pSFG-Fv-Fv-MC-T2A-αCD19.Q.CD8stm.ζ

[0133] FIG. 85 provides a plasmid map of pBP1439--pSFG--MC.FKBP_{V}-T2A-αCD19.Q.CD8stm.ζ

[0134] FIG. 86 provides a plasmid map of pBP1440--pSFG-FKBPv.ΔC9.T2A-αCD19.Q.CD8stm.ζ.T2A.P2A-MC.FKBP_{wt}.FRB_{L}

[0135] FIG. 87 provides a plasmid map of pBP1460--pSFG-FKBPv.ΔC9.T2A-αCD19.Q.CD8stm.ζ.T2A.P2A-MC.FKBP_{wt}.FRB_{L}

[0136] FIG. 88 provides a plasmid map of pBP1293--pSFG-iMC.T2A-αhCD33(My9.6).ζ

[0137] FIG. 89 provides a plasmid map of pBP1296--pSFG-iMC.T2A-αhCD123(32716).ζ

[0138] FIG. 90 provides a plasmid map of pBP1327--pSFG-FRB.FKBP_{V}.ΔC9.2A-ΔCD19

[0139] FIG. 91 provides a plasmid map of pBP1328--pSFG-FKBP_{V}.FRB.ΔC9.2A-ΔCD19

[0140] FIG. 92 provides a plasmid map of pBP1351--pSFG-SP163.FKBP.FRB.ΔC9.T2A-αhPSCA.Q.CD8stm.ζ.2A-iMC

[0141] FIG. 93 provides a plasmid map of pBP1373--pSFG-sp-FKBP.FRB.ΔC9.T2A-αhPSCAscFv.Q.CD8stm.ζ

[0142] FIG. 94 provides a plasmid map of pBP1385--pSFG-FRB.FKBP.ΔC9.T2A-ΔCD19

[0143] FIG. 95 provides a plasmid map of pBP1455--pSFG-MC.FKBP_{wt}.FRB_{L}.T2A-αPSCA.Q.CD8stm.ζ

[0144] FIG. 96 provides a plasmid map of pBP1466--pSFG-FKBPv.ΔC9.T2A-PSCA.Q.CD8stm.ζ.P2A-MC.FKBP_{wt}.FRB_{L}

[0145] FIG. 97 provides a plasmid map of pBP1474--pSFG-FKBPv.ΔC9.T2A-αHER2.Q.CD8stm.ζ

[0146] FIG. 98 provides a plasmid map of pBP1475--pSFG-FKBPv.ΔC9.T2A-αPSCA.Q.CD8stm.ζ

[0147] FIG. 99 provides a plasmid map of pBP1488--pSFG-FRB_{L}.FKBP_{wt}.MC-T2A-αPSCA.Q.CD8stm.ζ

[0148] FIG. 100 provides a plasmid map of pBP1491--pSFG--FKBPv.ΔC9.P2A.MC.FKBP_{wt}.FRB_{L}.T2A-αHER2.Q.CD8stm.ζ

[0149] FIG. 101 provides a plasmid map of pBP1493--pSFG-MC.FKBP_{wt}.FRB_{L}-P2A.FKBPv.ΔC9.T2A-αHER2.Q.CD8stm.ζ

[0150] FIG. 102 provides a plasmid map of pBP1494--pSFG-MC.FKBP_{wt}.FRB_{L}-P2A.FKBPv.ΔC9.T2A-PSCA.Q.CD8stm.ζ

[0151] FIG. 103 provides a plasmid map of pBP1757--pSFG-FRB_{L}.FKBP_{wt}.MC-P2A.FKBPv.ΔC9.T2A-αPSCA.Q.CD8stm.ζ

[0152] FIG. 104 provides a plasmid map of pBP1759--pSFG--FRB_{L}.FKBP_{wt}.MC-P2A.FKBPv.ΔC9.T2A-αHER2.Q.CD8stm.ζ

[0153] FIG. 105 provides a plasmid map of pBP1796--pSFG--FKBP_{wt}.FRB_{L}-MC. P2A.FKBPv.ΔC9.T2A-αPSCA.Q.CD8stm.ζ

[0154] FIG. 106A provides a schematic of various inducible chimeric Caspase-9 constructs. FIG. 106 provides graphs of caspase activation assays. FIG. 106C is a photo of a Western blot showing protein expression.

[0155] FIG. 107A provides graphs of caspase activity. FIG. 107B provides graphs of SEAP activity.

[0156] FIG. 108A provides graphs of SEAP activity. FIG. 108B provides graphs of caspase activity. FIG. 108C provides a Western blot showing protein expression.

[0157] FIG. 109A provides a FACS analysis of transduction efficiency. FIG. 109B provides graphs of bioiluminesence. FIG. 109C provides photos of bioiluminesence in mice. FIG. 109D provides graphs of FACs analysis of mice spleen cells.

[0158] FIG. 110A provides a FACs analysis of transduction efficiency. FIG. 110B provides graphs of bioiluminescence. FIG. 110C provides photos of bioiluminescence in mice. FIG. 110D provides a graph of FACs analysis of mice spleen cells.

[0159] FIG. 111 provides a schematic of a vector encoding a CD123-CAR-ζ and an iMC polypeptide.

[0160] FIG. 112A provides a graph of IL-6 production; FIG. 112 B provides a graph of IL-2 production; FIG. 112C provides a graph of total green fluorescence intensity of THP1-GP.Fluc, and FIG. 112D provides a graph of number of HPAC-RFP cells.

[0161] FIG. 113A provides a graph of IL-2 production; FIG. 113B provides a graph of THP1-FP.Fluc cells;

[0162] FIG. 113C provides a graph of T cells-RFP; FIG. D provides a graph of THP1-GFP.Fluc green fluorescence; and FIG. E provides a graph of T cell-RFP red fluorescence.

[0163] FIG. 114A provides a FACs analysis; FIG. 114B provides a schematic of tumor growth via IVIS monitoring; FIG. 114C provides photos of bioiluminescence in mice; FIG. 114D provides a graph of CAR-T cell presence as measured by flow cytometry; and FIG. 114E provides a graph of vector copy number.

[0164] FIG. 115A provides photos of bioiluminescence in mice; FIG. 115B provides a graph of vector copy number.

[0165] FIG. 116 provides a schematic of inducible MC expressed with a recombinant TCR.

[0166] FIG. 117A provides a schematic of a PRAME TCR polypeptide; FIG. 117B provides a schematic of an iMC polypeptide; FIG. 117C provides a schematic of a PRAME-TCR polypeptide co-expressed with an iMC polypeptide; FIG. 117D provides a graph of IL-2 production, items listed along the X-axis are in the same order as the legend.

[0167] FIG. 118A provides a schematic of trans-well assay set-up; FIG. 118B provides a graph of HLA-A, B, C levels.

[0168] FIG. 119 A provides a graph of specific lysis. FIG. 119B provides a graph of IL-2 production.

[0169] FIG. 120A provides a graph of specific lysis; FIG. 120 B provides a graph of IL-2 production.

[0170] FIG. 121A provides a schematic of an immune-deficient NSG xenographt model; FIG. 121B provides graphs of average radiance in non-transduced and transduced cells; FIG. 121C provides a graph of the number of Vβ1⁺CD8⁺ cells/spleen; FIG. 121D provides a graph of the number of Vβ1⁺CD8⁺ cells/spleen.

### DETAILED DESCRIPTION

[0171] As a mechanism to translate information from the external environment to the inside of the cell, regulated protein-protein interactions evolved to control most, if not all, signaling pathways. Transduction of signals is governed by enzymatic processes, such as amino acid side chain phosphorylation, acetylation, or proteolytic cleavage that lack intrinsic specificity. Furthermore, many proteins or factors are present at cellular concentrations or at subcellular locations that preclude spontaneous generation of a sufficient substrate/product relationship to activate or propagate signaling. An important component of activated signaling is the recruitment of these components to signaling “nodes” or spatial signaling centers that efficiently transmit (or attenuate) the pathway via appropriate upstream signals.

[0172] As a tool to artificially isolate and manipulate individual protein-protein interactions and hence individual signaling proteins, chemically induced dimerization (CID) technology was developed to impose homotypic or heterotypic interactions on target proteins to reproduce natural biological regulation. In its simplest form, a single protein would be modified to contain one or more structurally identical ligand binding domains, which would then be the basis of homodimerization or oligomerization, respectively, in the presence of a cognate homodimeric ligand (Spencer D M et al (93) Science 262, 1019-24). A slightly more complicated version of this concept would involve placing one or more distinct ligand binding domains on two different proteins to enable heterodimerization of these signaling molecules using small molecule, heterodimeric ligands that bind to both distinct domains simultaneously (Ho S N et al (96) Nature 382, 822-6). This drug-mediated dimerization creates a very high local concentration of ligand binding-domain-tagged components sufficient to permit their induced or spontaneous assembly and regulation.

[0173] In some embodiments, provided herein are methods to induce multimerization of proteins. In this case, two or more heterodimer ligand binding regions (or “domains”) in tandem are used as a “molecular scaffold” to dimerize or oligomerize a second, signaling domain-containing protein that is fused to one or more copies of the second binding site for the heterodimeric ligand. The molecular scaffold can be expressed as an isolated multimer of ligand binding domains (FIG. 8), either localized within the cell or unlocalized (FIG. 8B, 8C), or it can be attached to another protein that provides a structural, signaling, cell marking, or more complex combinatorial function (FIG. 9). By “scaffold” is meant a polypeptide that comprises at least two, for example, two or more, heterodimer ligand binding regions; in certain examples the ligand binding regions are in tandem, that is, each ligand binding region is located directly proximal to the next ligand binding region. In other examples, each ligand binding region may be located close to the next ligand binding region, for example, separated by about 1, 2, 3, 4, 5, 6, 7, 8, 9, 10, 11, 12, 13, 14, 15, 16, 17, 18, 19, 20, 25, 30, 35, 40, 45, 50, 55, 60, 65, 70, 75, 80 or more amino acids, but retain the scaffold function of dimerization of an inducible caspase molecule in the presence of a dimerizer. A scaffold may comprise, for example, at least 2, 3, 4, 5, 6, 7, 8, 9, 10, 11, 12, 13, 14, 15, 16, 17, 18, 19, 20 or more ligand binding regions, and may also be linked to another polypeptide, such as, for example, a marker polypeptide, a costimulating molecule, a chimeric antigen receptor, a T cell receptor, or the like.

[0174] In some embodiments, the first polypeptide consists essentially of at least two, three, four, five, six, seven, eight, nine, ten, 11, 12, 13, 14, 15, 16, 17, 18, 19, or 20 units of the first multimerizing region. In some embodiments, first polypeptide consists essentially of the scaffold region. In some embodiments, the first polypeptide consists essentially of a membrane association region or a membrane targeting region. By “consists essentially of” is meant that the scaffold units or the scaffold may be alone, can optionally include linker polypeptides at either terminus of the scaffold, or between the units, and can optionally include small polypeptides such as, for example stem polypeptides as shown in FIGS. 10B, 100, 10D, and 10E.

[0175] In one example, a tandem multimer of the ˜89 aa FK506-rapamycin binding (FRB) domain derived from the protein kinase mTOR (Chen J et al (95) PNAS, 92, 4947-51) is used to recruit multiple FKBPv36-fused Caspase-9 (iC9/iCaspase-9) in the presence of rapamycin or a rapamycin-based analogue (“rapalog”) (Liberles S D (97) PNAS 94, 7825-30; Rivera V M (96) Nat Med 2, 1028-1032, Stankunas K (03) Mol Cell 12, 1615-24; Bayle J H (06) Chem & Biol, 13, 99-107) (FIGS. 1-3). This recruitment leads to spontaneous caspase dimerization and activation.

[0176] In a second example, the tandem FRB domains are fused to a chimeric antigen receptor (CAR) and this provides rapalog-driven iC9 activation to cells expressing both fusion proteins (FIG. 15, inset).

[0177] In a third example, the polarity of the two proteins are reversed so that two or more copies of FKBP12 are used to recruit and multimerize FRB-modified signaling molecules in the presence of rapamycin (FIG. 8C, 9A).

[0178] In some examples, a chimeric polypeptide may comprise a single ligand binding region, or a scaffold comprising more than one ligand binding region may be, where the chimeric polypeptide comprises a polypeptide such as, for example, a MyD88 polypeptide, a truncated MyD88 polypeptide, a cytoplasmic CD40 polypeptide, a chimeric MyD88/cytoplasmic CD40 polypeptide or a chimeric truncated MyD88/cytoplasmic CD40 polypeptide.

[0179] By MyD88, or MyD88 polypeptide, is meant the polypeptide product of the myeloid differentiation primary response gene 88, for example, but not limited to the human version, cited as ncbi Gene ID 4615. By “truncated,” is meant that the protein is not full length and may lack, for example, a domain. For example, a truncated MyD88 is not full length and may, for example, be missing the TIR domain. An example of a truncated MyD88 polypeptide amino acid sequence is presented as SEQ ID NO: 969. By a nucleic acid sequence coding for “truncated MyD88” is meant the nucleic acid sequence coding for the truncated MyD88 peptide, the term may also refer to the nucleic acid sequence including the portion coding for any amino acids added as an artifact of cloning, including any amino acids coded for by the linkers. It is understood that where a method or construct refers to a truncated MyD88 polypeptide, the method may also be used, or the construct designed to refer to another MyD88 polypeptide, such as a full length MyD88 polypeptide. Where a method or construct refers to a full length MyD88 polypeptide, the method may also be used, or the construct designed to refer to a truncated MyD88 polypeptide.

[0180] In the methods herein, the CD40 portion of the peptide may be located either upstream or downstream from the MyD88 or truncated MyD88 polypeptide portion.

[0181] In a fourth example, unstable FRB variants (e.g., FRBL2098) are used to destabilize the signaling molecule prior to rapalog administration (Stankunas K (03) Mol Cell 12, 1615-24; Stankunas K (07) ChemBioChem 8, 1162-69) (FIG. 9, 10). Following rapalog exposure, the unstable fusion molecule is stabilized leading to aggregation as before, but with lower background signaling.

[0182] The use of ligands to direct signaling proteins may be generally applied to activate or attenuate many signaling pathways. Examples are provided herein that demonstrate a utility of the approach by controlling apoptosis or programmed cell death with the “initiating caspase”, Caspase-9 as the primary target. Control of apoptosis by dimerization of proapoptotic proteins with widely available rapamycin or more proprietary rapalogs, should permit an experimenter or clinician to tightly and rapidly control the viability of a cell-based implant that displays unwanted effects. Examples of these effects include, but are not limited to, Graft versus Host (GvH) immune responses against off-target tissue or excessive, uncontrolled growth or metastasis of an implant. Rapid induction of apoptosis will severely attenuate the unwanted cell's function and permit the natural clearance of the dead cells by phagocytic cells, such as macrophages, without undue inflammation.

[0183] Apoptosis is tightly regulated and naturally uses scaffolds, such as Apaf-1, CRADD/RAIDD, or FADD/Mort1, to oligomerize and activate the caspases that can ultimately kill the cell. Apaf-1 can assemble the apoptotic protease Caspase-9 into a latent complex that then forms an active oligomeric apoptosome upon recruitment of cytochrome C to the scaffold. The key event is oligomerization of the scaffold units causing dimerization and activation of the caspase. Similar adapters, such as CRADD, can oligomerize Caspase-2, leading to apoptosis. The compositions and methods provided herein use, for example, multimeric versions of the ligand binding domains FRB or FKBP to serve as scaffolds that permit the spontaneous dimerization and activation of caspase units present as FRB or FKBP fusions upon recruitment with rapamycin.

[0184] Using certain of the methods provided in the examples herein, caspase activation occurs only when rapamycin or rapalogs are present to recruit the FRB or FKBP-fused caspase to the scaffold. In these methods, the FRB or FKBP polypeptides must be present as a multimeric unit not as monomers to drive FKBP- or FRB-caspase dimerization (except when FRB-Caspase-9 is dimerized with FKBP-Caspase-9). The FRB or FKBP-based scaffold can be expressed in a targeted cell as a fusion with other proteins and retains its capacity to serve as a scaffold to assemble and activate proapoptotic molecules. The FRB or FKBP scaffold may be localized within the cytosol as a soluble entity or present in specific subcellular locales, such as the plasma membrane through targeting signals. The components used to activate apoptosis and the downstream components that degrade the cell are shared by all cells and across species. With regard to Caspase-9 activation, these methods can be broadly utilized in cell lines, in normal primary cells, such as, for example, but not limited to, T cells, or in cell implants.

[0185] In certain examples of the direct dimerization of FRB-Caspase with FKBP-Caspase with rapamycin to direct apoptosis, it was shown that FKBP-fused Caspases can be dimerized by homodimerizer molecules, such as AP1510, AP20187 or AP1903 (FIG. 6 (right panel), 10A (schematic) (A similar proapototic switch can be directed via heterodimerization of a binary switch using rapamycin or rapalogs by coexpression of a FRB-Caspase-9 fusion protein along with FKBP-Caspase-9, leading to homodimerization of the caspase domains within the chimeric proteins (FIG. 8A (schematic), 10B (schematic), (11).

[0186] As used herein, the use of the word “a” or “an” when used in conjunction with the term “comprising” in the claims and/or the specification may mean “one,” but it is also consistent with the meaning of “one or more,” “at least one,” and “one or more than one.” Still further, the terms “having”, “including”, “containing” and “comprising” are interchangeable and one of skill in the art is cognizant that these terms are open ended terms.

[0187] The following table outlines the nature of some of the nomenclature and acronyms for the switches discussed in this and the following examples.

| Short Name | Molecular Construct | Other Reference |
|---|---|---|
| iC9, FvC9, iCasp-9, | FKBPvΔC9 | FKBP12v36-Caspase-9, |
| iCaspase-9 | | CaspaCIDe |
| FRB.C9, FRB.Casp-9 | FRBΔC9 | RapaCIDe-1.0 |
| iC9 + FRB.C9 | FKBP12ΔC9 + FRBΔC9 | RapaCIDe-2.0 |
| iRC9, FwtFRB.C9 | FKBP.FRBΔC9 | FKBP12-FRBΔC9, |
| | | RapaCIDe-3.0, FFC9, iFFC9 |
| iRC9, FRB.FwtC9 | FRB.FKBPΔC9 | FRB-FKBP12ΔC9, |
| | | RapaCIDe-3.1, FFC9, iFFC9 |
| iMC, MC.FvFv | MC.FKBPv.FKBPv | MC. FKBP12v36- |
| | | FKBP12v36, inducible |
| | | MyD88/CD40, FvFvMC |
| | | (variant), FFMC, iFFMC |
| iRMC, FRB.FwtMC | FRB.FKBPwtMC or | FRBFwtMC or FwtFRBMC, |
| | FKBPwt.FRBMC | MC-Rap |
| iRMC, MC.FRB.Fwt | MC.FRB.FKBPwt or | MC.FRBFwt or MC.FwtFRB, |
| | MC.FKBPwt.FRB | MC-Rap |
| iC9 + CARζ + iRMC | FvΔC9 + CARζ + FRB.FwtMC | DragCAR-3.0, variant |
| | | domain permutations |
| iC9 + CARζ + MC | FvΔC9 + CARζ-2A-MC | CIDeCAR |
| iMC + CARζ | MC.FvFv + CARζ | GoCAR |
| iRmC9, FvFRB.C9 | FKBPV.FRBΔC9 | Dual-switch inducible |
| | | caspase, |
| | | FKBP12v36FRBΔC9, |
| | | RipaCIDe |
| iRmC9, FRB.FvC9 | FRB.FKBPvΔC9 | Dual-switch inducible |
| | | caspase, |
| | | FRB.FKBP12v36ΔC9, |
| | | RipaCIDe |
| FRB.C9 + iMC + CARζ | FRBΔC9 + MC.FvFv + CARζ | DragCAR-1.0 |
| iRC9 + iMC + CARζ | Fwt.FRBΔC9 + MC.FvFv | DragCAR-2.0 + variant |
| | | domain permutations |

[0188] The term “allogeneic” as used herein, refers to HLA or MHC loci that are antigenically distinct.

[0189] Thus, cells or tissue transferred from the same species can be antigenically distinct. Syngeneic mice can differ at one or more loci (congenics) and allogeneic mice can have the same background.

[0190] The term “antigen” as used herein is defined as a molecule that provokes an immune response. This immune response may involve either antibody production, or the activation of specific immunologically-competent cells, or both.

[0191] An “antigen recognition moiety” may be any polypeptide or fragment thereof, such as, for example, an antibody fragment variable domain, either naturally-derived, or synthetic, which binds to an antigen. Examples of antigen recognition moieties include, but are not limited to, polypeptides derived from antibodies, such as, for example, single-chain variable fragments (scFv), Fab, Fab′, F(ab′)2, and Fv fragments; polypeptides derived from T Cell receptors, such as, for example, TCR variable domains; and any ligand or receptor fragment that binds to the extracellular cognate protein.

[0192] The term “cancer” as used herein is defined as a hyperproliferation of cells whose unique trait—loss of normal controls—results in unregulated growth, lack of differentiation, local tissue invasion, and metastasis. Examples include but are not limited to, melanoma, non-small cell lung, small-cell lung, lung, hepatocarcinoma, leukemia, retinoblastoma, astrocytoma, glioblastoma, gum, tongue, neuroblastoma, head, neck, breast, pancreatic, prostate, renal, bone, testicular, ovarian, mesothelioma, cervical, gastrointestinal, lymphoma, brain, colon, sarcoma or bladder.

[0193] Donor: The term “donor” refers to a mammal, for example, a human, that is not the patient recipient. The donor may, for example, have HLA identity with the recipient, or may have partial or greater HLA disparity with the recipient.

[0194] Haploidentical: The term “haploidentical” as used with reference to cells, cell types and/or cell lineages, herein refers to cells sharing a haplotype or cells having substantially the same alleles at a set of closely linked genes on one chromosome. A haploidentical donor does not have complete HLA identity with the recipient, there is a partial HLA disparity.

[0195] Blood disease: The terms “blood disease”, “blood disease” and/or “diseases of the blood” as used herein, refers to conditions that affect the production of blood and its components, including but not limited to, blood cells, hemoglobin, blood proteins, the mechanism of coagulation, production of blood, production of blood proteins, the like and combinations thereof. Non-limiting examples of blood diseases include anemias, leukemias, lymphomas, hematological neoplasms, albuminemias, haemophilias and the like.

[0196] Bone marrow disease: The term “bone marrow disease” as used herein, refers to conditions leading to a decrease in the production of blood cells and blood platelets. In some bone marrow diseases, normal bone marrow architecture can be displaced by infections (e.g., tuberculosis) or malignancies, which in turn can lead to the decrease in production of blood cells and blood platelets. Non-limiting examples of bone marrow diseases include leukemias, bacterial infections (e.g., tuberculosis), radiation sickness or poisoning, apnocytopenia, anemia, multiple myeloma and the like.

[0197] T cells and Activated T cells (include that this means CD3⁺ cells): T cells (also referred to as T lymphocytes) belong to a group of white blood cells referred to as lymphocytes. Lymphocytes generally are involved in cell-mediated immunity. The “T” in “T cells” refers to cells derived from or whose maturation is influenced by the thymus. T cells can be distinguished from other lymphocytes types such as B cells and Natural Killer (NK) cells by the presence of cell surface proteins known as T cell receptors. The term “activated T cells” as used herein, refers to T cells that have been stimulated to produce an immune response (e.g., clonal expansion of activated T cells) by recognition of an antigenic determinant presented in the context of a Class II major histocompatibility (MHC) marker. T-cells are activated by the presence of an antigenic determinant, cytokines and/or lymphokines and cluster of differentiation cell surface proteins (e.g., CD3, CD4, CD8, the like and combinations thereof). Cells that express a cluster of differential protein often are said to be “positive” for expression of that protein on the surface of T-cells (e.g., cells positive for CD3 or CD 4 expression are referred to as CD3⁺ or CD4⁺). CD3 and CD4 proteins are cell surface receptors or co-receptors that may be directly and/or indirectly involved in signal transduction in T cells.

[0198] Peripheral blood: The term “peripheral blood” as used herein, refers to cellular components of blood (e.g., red blood cells, white blood cells and platelets), which are obtained or prepared from the circulating pool of blood and not sequestered within the lymphatic system, spleen, liver or bone marrow.

[0199] Umbilical cord blood: Umbilical cord blood is distinct from peripheral blood and blood sequestered within the lymphatic system, spleen, liver or bone marrow. The terms “umbilical cord blood”, “umbilical blood” or “cord blood”, which can be used interchangeably, refers to blood that remains in the placenta and in the attached umbilical cord after child birth. Cord blood often contains stem cells including hematopoietic cells.

[0200] By “cytoplasmic CD40” or “CD40 lacking the CD40 extracellular domain” is meant a CD40 polypeptide that lacks the CD40 extracellular domain. In some examples, the terms also refer to a CD40 polypeptide that lacks both the CD40 extracellular domain and a portion of, or all of, the CD40 transmembrane domain.

[0201] By “obtained or prepared” as, for example, in the case of cells, is meant that the cells or cell culture are isolated, purified, or partially purified from the source, where the source may be, for example, umbilical cord blood, bone marrow, or peripheral blood. The terms may also apply to the case where the original source, or a cell culture, has been cultured and the cells have replicated, and where the progeny cells are now derived from the original source.

[0202] By “kill” or “killing” as in a percent of cells killed, is meant the death of a cell through apoptosis, as measured using any method known for measuring apoptosis, and, for example, using the assays discussed herein, such as, for example the SEAP assays or T cell assays discussed herein. The term may also refer to cell ablation.

[0203] Allodepletion: The term “allodepletion” as used herein, refers to the selective depletion of alloreactive T cells. The term “alloreactive T cells” as used herein, refers to T cells activated to produce an immune response in reaction to exposure to foreign cells, such as, for example, in a transplanted allograft. The selective depletion generally involves targeting various cell surface expressed markers or proteins, (e.g., sometimes cluster of differentiation proteins (CD proteins), CD19, or the like), for removal using immunomagnets, immunotoxins, flow sorting, induction of apoptosis, photodepletion techniques, the like or combinations thereof. In the present methods, the cells may be transduced or transfected with the chimeric protein-encoding vector before or after allodepletion. Also, the cells may be transduced or transfected with the chimeric protein-encoding vector without an allodepletion step, and the non-allodepleted cells may be administered to the patient. Because of the added “safety switch” it is, for example, possible to administer the non-allo-depleted (or only partially allo-depleted) T cells because an adverse event such as, for example, graft versus host disease, may be alleviated upon the administration of the multimeric ligand.

[0204] Graft versus host disease: The terms “graft versus host disease” or “GvHD”, refer to a complication often associated with allogeneic bone marrow transplantation and sometimes associated with transfusions of un-irradiated blood to immunocompromised patients. Graft versus host disease sometimes can occur when functional immune cells in the transplanted marrow recognize the recipient as “foreign” and mount an immunologic response. GvHD can be divided into an acute form and a chronic form. Acute GVHD (aGVHD) often is observed within the first 100 days following transplant or transfusion and can affect the liver, skin, mucosa, immune system (e.g., the hematopoietic system, bone marrow, thymus, and the like), lungs and gastrointestinal tract. Chronic GVHD (cGVHD) often begins 100 days or later post transplant or transfusion and can attack the same organs as acute GvHD, but also can affect connective tissue and exocrine glands. Acute GvHD of the skin can result in a diffuse maculopapular rash, sometimes in a lacy pattern.

[0205] Donor T cell: The term “donor T cell” as used here refers to T cells that often are administered to a recipient to confer anti-viral and/or anti-tumor immunity following allogeneic stem cell transplantation. Donor T cells often are utilized to inhibit marrow graft rejection and increase the success of alloengraftment, however the same donor T cells can cause an alloaggressive response against host antigens, which in turn can result in graft versus host disease (GVHD). Certain activated donor T cells can cause a higher or lower GvHD response than other activated T cells. Donor T cells may also be reactive against recipient tumor cells, causing a beneficial graft vs. tumor effect.

[0206] Mesenchymal stromal cell: The terms “mesenchymal stromal cell” or “bone marrow derived mesenchymal stromal cell” as used herein, refer to multipotent stem cells that can differentiate ex vivo, in vitro and in vivo into adipocytes, osteoblasts and chondroblasts, and may be further defined as a fraction of mononuclear bone marrow cells that adhere to plastic culture dishes in standard culture conditions, are negative for hematopoietic lineage markers and are positive for CD73, CD90 and CD105.

[0207] Embryonic stem cell: The term “embryonic stem cell” as used herein, refers to pluripotent stem cells derived from the inner cell mass of the blastocyst, an early-stage embryo of between 50 to 150 cells. Embryonic stem cells are characterized by their ability to renew themselves indefinitely and by their ability to differentiate into derivatives of all three primary germ layers, ectoderm, endoderm and mesoderm. Pluripotent is distinguished from mutipotent in that pluripotent cells can generate all cell types, while multipotent cells (e.g., adult stem cells) can only produce a limited number of cell types.

[0208] Inducible pluripotent stem cell: The terms “inducible pluripotent stem cell” or “induced pluripotent stem cell” as used herein refers to adult, or differentiated cells, that are “reprogrammed” or induced by genetic (e.g., expression of genes that in turn activates pluripotency), biological (e.g., treatment viruses or retroviruses) and/or chemical (e.g., small molecules, peptides and the like) manipulation to generate cells that are capable of differentiating into many if not all cell types, like embryonic stem cells. Inducible pluripotent stem cells are distinguished from embryonic stem cells in that they achieve an intermediate or terminally differentiated state (e.g., skin cells, bone cells, fibroblasts, and the like) and then are induced to dedifferentiate, thereby regaining some or all of the ability to generate multipotent or pluripotent cells.

[0209] CD34⁺ cell: The term “CD34⁺ cell” as used herein refers to a cell expressing the CD34 protein on its cell surface. “CD34” as used herein refers to a cell surface glycoprotein (e.g., sialomucin protein) that often acts as a cell-cell adhesion factor and is involved in T cell entrance into lymph nodes, and is a member of the “cluster of differentiation” gene family. CD34 also may mediate the attachment of stem cells to bone marrow, extracellular matrix or directly to stromal cells. CD34⁺ cells often are found in the umbilical cord and bone marrow as hematopoietic cells, a subset of mesenchymal stem cells, endothelial progenitor cells, endothelial cells of blood vessels but not lymphatics (except pleural lymphatics), mast cells, a sub-population of dendritic cells (which are factor XIIIa negative) in the interstitium and around the adnexa of dermis of skin, as well as cells in certain soft tissue tumors (e.g., alveolar soft part sarcoma, pre-B acute lymphoblastic leukemia (Pre-B-ALL), acute myelogenous leukemia (AML), AML-M7, dermatofibrosarcoma protuberans, gastrointestinal stromal tumors, giant cell fibroblastoma, granulocytic sarcoma, Kaposi's sarcoma, liposarcoma, malignant fibrous histiocytoma, malignant peripheral nerve sheath tumors, mengingeal hemangiopericytomas, meningiomas, neurofibromas, schwannomas, and papillary thyroid carcinoma).

[0210] Gene expression vector: The terms “gene expression vector”, “nucleic acid expression vector”, or “expression vector” as used herein, which can be used interchangeably throughout the document, generally refers to a nucleic acid molecule (e.g., a plasmid, phage, autonomously replicating sequence (ARS), artificial chromosome, yeast artificial chromosome (e.g., YAC)) that can be replicated in a host cell and be utilized to introduce a gene or genes into a host cell. The genes introduced on the expression vector can be endogenous genes (e.g., a gene normally found in the host cell or organism) or heterologous genes (e.g., genes not normally found in the genome or on extra-chromosomal nucleic acids of the host cell or organism). The genes introduced into a cell by an expression vector can be native genes or genes that have been modified or engineered. The gene expression vector also can be engineered to contain 5′ and 3′ untranslated regulatory sequences that sometimes can function as enhancer sequences, promoter regions and/or terminator sequences that can facilitate or enhance efficient transcription of the gene or genes carried on the expression vector. A gene expression vector sometimes also is engineered for replication and/or expression functionality (e.g., transcription and translation) in a particular cell type, cell location, or tissue type. Expression vectors sometimes include a selectable marker for maintenance of the vector in the host or recipient cell.

[0211] Developmentally regulated promoter: The term “developmentally regulated promoter” as used herein refers to a promoter that acts as the initial binding site for RNA polymerase to transcribe a gene which is expressed under certain conditions that are controlled, initiated by or influenced by a developmental program or pathway. Developmentally regulated promoters often have additional control regions at or near the promoter region for binding activators or repressors of transcription that can influence transcription of a gene that is part of a development program or pathway. Developmentally regulated promoters sometimes are involved in transcribing genes whose gene products influence the developmental differentiation of cells.

[0212] Developmentally differentiated cells: The term “developmentally differentiated cells”, as used herein refers to cells that have undergone a process, often involving expression of specific developmentally regulated genes, by which the cell evolves from a less specialized form to a more specialized form in order to perform a specific function. Non-limiting examples of developmentally differentiated cells are liver cells, lung cells, skin cells, nerve cells, blood cells, and the like. Changes in developmental differentiation generally involve changes in gene expression (e.g., changes in patterns of gene expression), genetic re-organization (e.g., remodeling or chromatin to hide or expose genes that will be silenced or expressed, respectively), and occasionally involve changes in DNA sequences (e.g., immune diversity differentiation). Cellular differentiation during development can be understood as the result of a gene regulatory network. A regulatory gene and its cis-regulatory modules are nodes in a gene regulatory network that receive input (e.g., protein expressed upstream in a development pathway or program) and create output elsewhere in the network (e.g., the expressed gene product acts on other genes downstream in the developmental pathway or program).

[0213] The terms “cell,” “cell line,” and “cell culture” as used herein may be used interchangeably. All of these terms also include their progeny, which are any and all subsequent generations. It is understood that all progeny may not be identical due to deliberate or inadvertent mutations.

[0214] As used here, the term “rapalog” is meant as an analog of the natural antibiotic rapamycin. Certain rapalogs in the present embodiments have properties such as stability in serum, a poor affinity to wildtype FRB (and hence the parent protein, mTOR, leading to reduction or elimination of immunosuppressive properties), and a relatively high affinity to a mutant FRB domain. For commercial purposes, in certain embodiments, the rapalogs have useful scaling and production properties. Examples of rapalogs include, but are not limited to, S-o,p-dimethoxyphenyl (DMOP)-rapamycin: EC₅₀ (wt FRB (K2095 T2098 W2101)˜1000 nM), EC₅₀ (FRB-KLW˜5 nM) Luengo J I (95) Chem & Biol 2:471-81; Luengo J I (94) J. Org Chem 59:6512-6513; U.S. Pat. No. 6,187,757; R-Isopropoxyrapamycin: EC₅₀ (wt FRB (K2095 T2098 W2101)˜300 nM), EC₅₀ (FRB-PLF˜8.5 nM); Liberles S (97) PNAS 94: 7825-30; and S-Butanesulfonamidorap (AP23050): EC₅₀ (wt FRB (K2095 T2098 W2101)˜2.7 nM), EC₅₀ (FRB-KTF˜>200 nM) Bayle (06) Chem & Bio. 13: 99-107.

[0215] The term “FRB” refers to the FKBP12-Rapamycin-Binding (FRB) domain (residues 2015-2114 encoded within mTOR), and analogs thereof. In certain embodiments, FRB analogs or variants are provided. The properties of an FRB analog or variant variant are stability (some variants are more labile than others) and ability to bind to various rapalogs. In certain embodiments, the FRB analog or variant binds to a C7 rapalog, such as, for example, those provided in the present application, and those referred to in publications that are incorporated by reference herein. In certain embodiments, the FRB analog or variant comprises an amino acid substitution at position T2098. Based on the crystal structure conjugated to rapamcyin, there are 3 key rapamycin-interacting residues that have been most analyzed, K2095, T2098, and W2101. Mutation of all three leads to an unstable protein that can be stabilized in the presence of rapamycin or some rapalogs. This feature can be used to further increase the signal:noise ratio in some applications. Examples of mutants are discussed in Bayle et al (06) Chem & Bio 13: 99-107; Stankunas et al (07) Chembiochem 8:1162-1169; and Liberles S (97) PNAS 94:7825-30). Examples of FRB variant polypeptide regions of the present embodiments include, but are not limited to, KLW (with L2098); KTF (with F2101); and KLF (L2098, F2101). FRB variant KLW corresponds to the FRBL polypeptide, for example, consisting of the amino acid of SEQ ID NO: 3031085, and has a substitution of an L residue at position 2098. By comparing the KLW variant of SEQ ID NO: 1085 with the wild type FRB polypeptide, for example, the polypeptide consisting of the amino acid sequence of SEQ ID NO: 1066, one can determine the sequence of the other FRB variants listed herein.

[0216] Each ligand can include two or more portions (e.g., defined portions, distinct portions), and sometimes includes two, three, four, five, six, seven, eight, nine, ten, or more portions. The first ligand and second ligand each, independently, can consist of two portions (i.e., dimer), consist of three portions (i.e., trimer) or consist of four portions (i.e., tetramer). The first ligand sometimes includes a first portion and a second portion and the second ligand sometimes includes a third portion and a fourth portion. The first portion and the second portion often are different (i.e., heterogeneous (e.g., heterodimer)), the first portion and the third portion sometimes are different and sometimes are the same, and the third portion and the fourth portion often are the same (i.e., homogeneous (e.g., homodimer)). Portions that are different sometimes have a different function (e.g., bind to the first multimerizing region, bind to the second multimerizing region, do not significantly bind to the first multimerizing region, do not significantly bind to the second multimerizing region (e.g., the first portion binds to the first multimerizing region but does not significantly bind to the second multimerizing region) and sometimes have a different chemical structure. Portions that are different sometimes have a different chemical structure but can bind to the same multimerizing region (e.g., the second portion and the third portion can bind to the second multimerizing region but can have different structures). The first portion sometimes binds to the first multimerizing region and sometimes does not bind significantly to the second multimerizing region. Each portion sometimes is referred to as a “monomer” (e.g., first monomer, second monomer, third monomer and fourth monomer that tracks the first portion, second portion, third portion and fourth portion, respectively). Each portion sometimes is referred to as a “side.” Sides of a ligand may sometimes be adjacent to each other, and may sometimes be located at opposing locations on a ligand.

[0217] By being “capable of binding”, as in the example of a multimeric or heterodimeric ligand binding to a multimerizing region or ligand binding region is meant that the ligand binds to the ligand binding region, for example, a portion, or portions, of the ligand bind to the multimerizing region, and that this binding may be detected by an assay method including, but not limited to, a biological assay, a chemical assay, or physical means of detection such as, for example, x-ray crystallography. In addition, where a ligand is considered to “not significantly bind” is meant that there may be minor detection of binding of a ligand to the ligand binding region, but that this amount of binding, or the stability of binding is not significantly detectable, and, when occurring in the cells of the present embodiment, does not activate the modified cell or cause apoptosis. In certain examples, where the ligand does not “significantly bind,” upon administration of the ligand, the amount of cells undergoing apoptosis is less than 10, 5, 4, 3, 2, or 1%.

[0218] By “region” or “domain” is meant a polypeptide, or fragment thereof, that maintains the function of the polypeptide as it relates to the chimeric polypeptides of the present application. That is, for example, an FKBP12 binding domain, FKBP12 domain, FKBP12 region, FKBP12 multimerizing region, and the like, refer to an FKBP12 polypeptide that binds to the CID ligand, such as, for example, rimiducid, or rapamycin, to cause, or allow for, dimerization or multimerization of the chimeric polypeptide. By “region” or “domain” of a pro-apoptotic polypeptide, for example, the Caspase-9 polypeptides or truncated Caspase-9 polypeptides of the present applications, is meant that upon dimerization or multimerization of the Caspase-9 region as part of the chimeric polypeptide, or chimeric pro-apoptotic polypeptide, the dimerized or multimerized chimeric polypeptide can participate in the caspase cascade, allowing for, or causing, apoptosis.

[0219] As used herein, the term “iCaspase-9” molecule, polypeptide, or protein is defined as an inducible Caspase-9. The term “iCaspase-9” embraces iCaspase-9 nucleic acids, iCaspase-9 polypeptides and/or iCaspase-9 expression vectors. The term also encompasses either the natural iCaspase-9 nucleotide or amino acid sequence, or a truncated sequence that is lacking the CARD domain.

[0220] As used herein, the term “iCaspase 1 molecule”, “iCaspase 3 molecule”, or “iCaspase 8 molecule” is defined as an inducible Caspase 1, 3, or 8, respectively. The term iCaspase 1, iCaspase 3, or iCaspase 8, embraces iCaspase 1, 3, or 8 nucleic acids, iCaspase 1, 3, or 8 polypeptides and/or iCaspase 1, 3, or 8 expression vectors, respectively. The term also encompasses either the natural CaspaseiCaspase-1, -3, or -8 nucleotide or amino acid sequence, respectively, or a truncated sequence that is lacking the CARD domain. By “wild type” Caspase-9 in the context of the experimental details provided herein, is meant the Caspase-9 molecule lacking the CARD domain.

[0221] Modified Caspase-9 polypeptides comprise at least one amino acid substitution that affects basal activity or IC₅₀, in a chimeric polypeptide comprising the modified Caspase-9 polypeptide. Methods for testing basal activity and IC₅₀ are discussed herein. Non-modified Caspase-9 polypeptides do not comprise this type of amino acid substitution. Both modified and non-modified Caspase-9 polypeptides may be truncated, for example, to remove the CARD domain.

[0222] “Function-conservative variants” are proteins or enzymes in which a given amino acid residue has been changed without altering overall conformation and function of the protein or enzyme, including, but not limited to, replacement of an amino acid with one having similar properties, including polar or non-polar character, size, shape and charge. Conservative amino acid substitutions for many of the commonly known non-genetically encoded amino acids are well known in the art. Conservative substitutions for other non-encoded amino acids can be determined based on their physical properties as compared to the properties of the genetically encoded amino acids.

[0223] Amino acids other than those indicated as conserved may differ in a protein or enzyme so that the percent protein or amino acid sequence similarity between any two proteins of similar function may vary and can be, for example, at least 70%, at least 80%, at least 90%, and at least 95%, as determined according to an alignment scheme. As referred to herein, “sequence similarity” means the extent to which nucleotide or protein sequences are related. The extent of similarity between two sequences can be based on percent sequence identity and/or conservation. “Sequence identity” herein means the extent to which two nucleotide or amino acid sequences are invariant. “Sequence alignment” means the process of lining up two or more sequences to achieve maximal levels of identity (and, in the case of amino acid sequences, conservation) for the purpose of assessing the degree of similarity. Numerous methods for aligning sequences and assessing similarity/identity are known in the art such as, for example, the Cluster Method, wherein similarity is based on the MEGALIGN algorithm, as well as BLASTN, BLASTP, and FASTA. When using any of these programs, the settings may be selected that result in the highest sequence similarity.

[0224] The amino acid residue numbers referred to herein reflect the amino acid position in the non-truncated and non-modified Caspase-9 polypeptide, for example, that of SEQ ID NO: 9. SEQ ID NO: 9 provides an amino acid sequence for the truncated Caspase-9 polypeptide, which does not include the CARD domain. Thus SEQ ID NO: 9 commences at amino acid residue number 135, and ends at amino acid residue number 416, with reference to the full length Caspase-9 amino acid sequence. Those of ordinary skill in the art may align the sequence with other sequences of Caspase-9 polypeptides to, if desired, correlate the amino acid residue number, for example, using the sequence alignment methods discussed herein.

[0225] As used herein, the term “cDNA” is intended to refer to DNA prepared using messenger RNA (mRNA) as template. The advantage of using a cDNA, as opposed to genomic DNA or DNA polymerized from a genomic, non- or partially-processed RNA template, is that the cDNA primarily contains coding sequences of the corresponding protein. There are times when the full or partial genomic sequence is used, such as where the non-coding regions are required for optimal expression or where non-coding regions such as introns are to be targeted in an antisense strategy.

[0226] As used herein, the term “expression construct” or “transgene” is defined as any type of genetic construct containing a nucleic acid coding for gene products in which part or all of the nucleic acid encoding sequence is capable of being transcribed can be inserted into the vector. The transcript is translated into a protein, but it need not be. In certain embodiments, expression includes both transcription of a gene and translation of mRNA into a gene product. In other embodiments, expression only includes transcription of the nucleic acid encoding genes of interest. The term “therapeutic construct” may also be used to refer to the expression construct or transgene. The expression construct or transgene may be used, for example, as a therapy to treat hyperproliferative diseases or disorders, such as cancer, thus the expression construct or transgene is a therapeutic construct or a prophylactic construct.

[0227] As used herein, the term “expression vector” refers to a vector containing a nucleic acid sequence coding for at least part of a gene product capable of being transcribed. In some cases, RNA molecules are then translated into a protein, polypeptide, or peptide. In other cases, these sequences are not translated, for example, in the production of antisense molecules or ribozymes. Expression vectors can contain a variety of control sequences, which refer to nucleic acid sequences necessary for the transcription and possibly translation of an operatively linked coding sequence in a particular host organism. In addition to control sequences that govern transcription and translation, vectors and expression vectors may contain nucleic acid sequences that serve other functions as well and are discussed infra.

[0228] As used herein, the term “ex vivo” refers to “outside” the body. The terms “ex vivo” and “in vitro” can be used interchangeably herein.

[0229] As used herein, the term “functionally equivalent,” as it relates to Caspase-9, or truncated Caspase-9, for example, refers to a Caspase-9 nucleic acid fragment, variant, or analog, refers to a nucleic acid that codes for a Caspase-9 polypeptide, or a Caspase-9 polypeptide, that stimulates an apoptotic response. “Functionally equivalent” refers, for example, to a Caspase-9 polypeptide that is lacking the CARD domain, but is capable of inducing an apoptotic cell response. When the term “functionally equivalent” is applied to other nucleic acids or polypeptides, such as, for example, CD19, the 5′LTR, the multimeric ligand binding region, or CD3, it refers to fragments, variants, and the like that have the same or similar activity as the reference polypeptides of the methods herein.

[0230] As used herein, the term “gene” is defined as a functional protein, polypeptide, or peptide-encoding unit. As will be understood, this functional term includes genomic sequences, cDNA sequences, and smaller engineered gene segments that express, or are adapted to express, proteins, polypeptides, domains, peptides, fusion proteins, and mutants.

[0231] The term “hyperproliferative disease” is defined as a disease that results from a hyperproliferation of cells. Exemplary hyperproliferative diseases include, but are not limited to cancer or autoimmune diseases. Other hyperproliferative diseases may include vascular occlusion, restenosis, atherosclerosis, or inflammatory bowel disease.

[0232] The term “immunogenic composition” or “immunogen” refers to a substance that is capable of provoking an immune response. Examples of immunogens include, e.g., antigens, autoantigens that play a role in induction of autoimmune diseases, and tumor-associated antigens expressed on cancer cells.

[0233] The term “immunocompromised” as used herein is defined as a subject that has reduced or weakened immune system. The immunocompromised condition may be due to a defect or dysfunction of the immune system or to other factors that heighten susceptibility to infection and/or disease. Although such a categorization allows a conceptual basis for evaluation, immunocompromised individuals often do not fit completely into one group or the other. More than one defect in the body's defense mechanisms may be affected. For example, individuals with a specific T-lymphocyte defect caused by HIV may also have neutropenia caused by drugs used for antiviral therapy or be immunocompromised because of a breach of the integrity of the skin and mucous membranes. An immunocompromised state can result from indwelling central lines or other types of impairment due to intravenous drug abuse; or be caused by secondary malignancy, malnutrition, or having been infected with other infectious agents such as tuberculosis or sexually transmitted diseases, e.g., syphilis or hepatitis.

[0234] As used herein, the term “pharmaceutically or pharmacologically acceptable” refers to molecular entities and compositions that do not produce adverse, allergic, or other untoward reactions when administered to an animal or a human.

[0235] As used herein, “pharmaceutically acceptable carrier” includes any and all solvents, dispersion media, coatings, antibacterial and antifungal agents, isotonic and absorption delaying agents and the like. The use of such media and agents for pharmaceutically active substances is well known in the art. Except insofar as any conventional media or agent is incompatible with the vectors or cells presented herein, its use in therapeutic compositions is contemplated. Supplementary active ingredients also can be incorporated into the compositions.

[0236] As used herein, the term “polynucleotide” is defined as a chain of nucleotides. Furthermore, nucleic acids are polymers of nucleotides. Thus, nucleic acids and polynucleotides as used herein are interchangeable. Nucleic acids are polynucleotides, which can be hydrolyzed into the monomeric “nucleotides.” The monomeric nucleotides can be hydrolyzed into nucleosides. As used herein polynucleotides include, but are not limited to, all nucleic acid sequences which are obtained by any means available in the art, including, without limitation, recombinant means, i.e., the cloning of nucleic acid sequences from a recombinant library or a cell genome, using ordinary cloning technology and PORT″, and the like, and by synthetic means. Furthermore, polynucleotides include mutations of the polynucleotides, include but are not limited to, mutation of the nucleotides, or nucleosides by methods well known in the art. A nucleic acid may comprise one or more polynucleotides.

[0237] As used herein, the term “polypeptide” is defined as a chain of amino acid residues, usually having a defined sequence. As used herein the term polypeptide is interchangeable with the terms “peptides” and “proteins”.

[0238] As used herein, the term “promoter” is defined as a DNA sequence recognized by the synthetic machinery of the cell, or introduced synthetic machinery, required to initiate the specific transcription of a gene.

[0239] The term “transfection” and “transduction” are interchangeable and refer to the process by which an exogenous DNA sequence is introduced into a eukaryotic host cell. Transfection (or transduction) can be achieved by any one of a number of means including electroporation, microinjection, gene gun delivery, retroviral infection, lipofection, superfection and the like.

[0240] As used herein, the term “syngeneic” refers to cells, tissues or animals that have genotypes that are identical or closely related enough to allow tissue transplant, or are immunologically compatible. For example, identical twins or animals of the same inbred strain. Syngeneic and isogeneic can be used interchangeably.

[0241] The terms “patient” or “subject” are interchangeable, and, as used herein include, but are not limited to, an organism or animal; a mammal, including, e.g., a human, non-human primate (e.g., monkey), mouse, pig, cow, goat, rabbit, rat, guinea pig, hamster, horse, monkey, sheep, or other non-human mammal; a non-mammal, including, e.g., a non-mammalian vertebrate, such as a bird (e.g., a chicken or duck) or a fish, and a non-mammalian invertebrate.

[0242] By “T cell activation molecule” is meant a polypeptide that, when incorporated into a T cell expressing a chimeric antigen receptor, enhances activation of the T cell. Examples include, but are not limited to, ITAM-containing, Signal 1 conferring molecules such as, for example, CD3 ζ polypeptide, and Fc receptor gamma, such as, for example, Fc epsilon receptor gamma (FcεR1γ) subunit (Haynes, N. M., et al. J. Immunol. 166:182-7 (2001)) J. Immunology).

[0243] As used herein, the term “under transcriptional control” or “operatively linked” is defined as the promoter is in the correct location and orientation in relation to the nucleic acid to control RNA polymerase initiation and expression of the gene.

[0244] As used herein, the terms “treatment”, “treat”, “treated”, or “treating” refer to prophylaxis and/or therapy.

[0245] As used herein, the term “vaccine” refers to a formulation that contains a composition presented herein which is in a form that is capable of being administered to an animal. Typically, the vaccine comprises a conventional saline or buffered aqueous solution medium in which the composition is suspended or dissolved. In this form, the composition can be used conveniently to prevent, ameliorate, or otherwise treat a condition. Upon introduction into a subject, the vaccine is able to provoke an immune response including, but not limited to, the production of antibodies, cytokines and/or other cellular responses.

[0246] In some embodiments, the nucleic acid is contained within a viral vector. In certain embodiments, the viral vector is a retroviral vector. In certain embodiments, the viral vector is an adenoviral vector or a lentiviral vector. It is understood that in some embodiments, the antigen-presenting cell is contacted with the viral vector ex vivo, and in some embodiments, the antigen-presenting cell is contacted with the viral vector in vivo.

### Hematopoietic Stem Cells and Cell Therapy

[0247] Hematopoietic stem cells include hematopoietic progenitor cells, immature, multipotent cells that can differentiate into mature blood cell types. These stem cells and progenitor cells may be isolated from bone marrow and umbilical cord blood, and, in some cases, from peripheral blood. Other stem and progenitor cells include, for example, mesenchymal stromal cells, embryonic stem cells, and inducible pluripotent stem cells.

[0248] Bone marrow derived mesenchymal stromal cells (MSCs) have been defined as a fraction of mononuclear bone marrow cells that adhere to plastic culture dishes in standard culture conditions, are negative for hematopoietic lineage markers and positive for CD73, CD90 and CD105, and able to differentiate in vitro into adipocytes, osteoblasts, and chondroblasts. While one physiologic role is presumed to be the support of hematopoiesis, several reports have also established that MSCs are able to incorporate and possibly proliferate in areas of active growth, such as cicatricial and neoplastic tissues, and to home to their native microenvironment and replace the function of diseased cells. Their differentiation potential and homing ability make MSCs attractive vehicles for cellular therapy, either in their native form for regenerative applications, or through their genetic modification for delivery of active biological agents to specific microenvironments such as diseased bone marrow or metastatic deposits. In addition, MSCs possess potent intrinsic immunosuppressive activity, and to date have found their most frequent application in the experimental treatment of graft-versus-host disease and autoimmune disorders (Pittenger, M. F., et al. (1999). Science 284: 143-147; Dominici, M., et al. (2006). Cytotherapy 8: 315-317; Prockop, D. J. (1997). Science 276: 71-74; Lee, R. H., et al. (2006). Proc Natl Acad Sci USA 103: 17438-17443; Studeny, M., et al., (2002). Cancer Res 62: 3603-3608; Studeny, M., et al. (2004). J Natl Cancer Inst 96: 1593-1603; Horwitz, E. M., et al. (1999). Nat Med 5: 309-313; Chamberlain, G., et al., (2007). Stem Cells 25: 2739-2749; Phinney, D. G., and Prockop, D. J. (2007). Stem Cells 25: 2896-2902; Horwitz, E. M., et al. (2002). Proc Natl Acad Sci USA 99: 8932-8937; Hall, B., et al., (2007). Int J Hematol 86: 8-16; Nauta, A. J., and Fibbe, W. E. (2007). Blood 110: 3499-3506; Le Blanc, K., et al. (2008). Lancet 371: 1579-1586; Tyndall, A., and Uccelli, A. (2009). Bone Marrow Transplant).

[0249] MSCs have been infused in hundreds of patients with minimal reported side effects. However, follow-up is limited, long term side effects are unknown, and little is known of the consequences that will be associated with future efforts to induce their in vivo differentiation, for example to cartilage or bone, or to genetically modify them to enhance their functionality. Several animal models have raised safety concerns. For instance, spontaneous osteosarcoma formation in culture has been observed in murine derived MSCs. Furthermore, ectopic ossification and calcification foci have been discussed in mouse and rat models of myocardial infarction after local injection of MSC, and their proarrhythmic potential has also been apparent in co-culture experiments with neonatal rat ventricular myocytes. Moreover, bilateral diffuse pulmonary ossification has been observed after bone marrow transplant in a dog, presumably due to the transplanted stromal components (Horwitz, E. M., et al., (2007). Biol Blood Marrow Transplant 13: 53-57; Tolar, J., et al. (2007). Stem Cells 25: 371-379; Yoon, Y.-S., et al., (2004). Circulation 109: 3154-3157; Breitbach, M., et al. (2007). Blood 110: 1362-1369; Chang, M. G., et al. (2006). Circulation 113: 1832-1841; Sale, G. E., and Storb, R. (1983). Exp Hematol 11: 961-966).

[0250] In another example of cell therapy, T cells transduced with a nucleic acid encoding a chimeric antigen receptor have been administered to patients to treat cancer (Zhong, X.-S., (2010) Molecular Therapy 18:413-420). Chimeric antigen receptors (CARs) are artificial receptors designed to convey antigen specificity to T cells without the requirement for MHC antigen presentation. They include an antigen-specific component, a transmembrane component, and an intracellular component selected to activate the T cell and provide specific immunity. Chimeric antigen receptor-expressing T cells may be used in various therapies, including cancer therapies. Costimulating polypeptides may be used to enhance the activation of CAR-expressing T cells against target antigens, and therefore increase the potency of adoptive immunotherapy.

[0251] For example, T cells expressing a chimeric antigen receptor based on the humanized monoclonal antibody Trastuzumab (Herceptin) has been used to treat cancer patients. Adverse events are possible, however, and in at least one reported case, the therapy had fatal consequences to the patient (Morgan, R. A., et al., (2010) Molecular Therapy 18:843-851). Transducing the cells with a chimeric Caspase-9-based safety switch as presented herein, would provide a safety switch that could stop the adverse event from progressing. Therefore, in some embodiments are provided nucleic acids, cells, and methods wherein the modified T cell also expresses an inducible Caspase-9 polypeptide. If there is a need, for example, to reduce the number of chimeric antigen receptor modified T cells, an inducible ligand may be administered to the patient, thereby inducing apoptosis of the modified T cells.

[0252] The antitumor efficacy from immunotherapy with T cells engineered to express chimeric antigen receptors (CARs) has steadily improved as CAR molecules have incorporated additional signaling domains to increase their potency. T cells transduced with first generation CARs, containing only the CD3ζ intracellular signaling molecule, have demonstrated poor persistence and expansion in vivo following adoptive transfer (Till B G, Jensen M C, Wang J, et al: CD20-specific adoptive immunotherapy for lymphoma using a chimeric antigen receptor with both CD28 and 4-1BB domains: pilot clinical trial results. Blood 119:3940-50, 2012; Pule M A, Savoldo B, Myers G D, et al: Virus-specific T cells engineered to coexpress tumor-specific receptors: persistence and antitumor activity in individuals with neuroblastoma. Nat Med 14:1264-70, 2008; Kershaw M H, Westwood J A, Parker L L, et al: A phase 1 study on adoptive immunotherapy using gene-modified T cells for ovarian cancer. Clin Cancer Res 12:6106-15, 2006), as tumor cells often lack the requisite costimulating molecules necessary for complete T cell activation. Second generation CAR T cells were designed to improve proliferation and survival of the cells. Second generation CAR T cells that incorporate the intracellular costimulating domains from either CD28 or 4-1BB (Carpenito C, Milone M C, Hassan R, et al: Control of large, established tumor xenografts with genetically retargeted human T cells containing CD28 and CD137 domains. Proc Natl Acad Sci USA 106:3360-5, 2009; Song D G, Ye Q, Poussin M, et al: CD27 costimulation augments the survival and antitumor activity of redirected human T cells in vivo. Blood 119:696-706, 2012), show improved survival and in vivo expansion following adoptive transfer, and more recent clinical trials using anti-CD19 CAR-modified T cells containing these costimulating molecules have shown remarkable efficacy for the treatment of CD19⁺ leukemia. (Kalos M, Levine B L, Porter D L, et al: T cells with chimeric antigen receptors have potent antitumor effects and can establish memory in patients with advanced leukemia. Sci Transl Med 3:95ra73, 2011; Porter D L, Levine B L, Kalos M, et al: Chimeric antigen receptor-modified T cells in chronic lymphoid leukemia. N Engl J Med 365:725-33, 2011; Brentjens R J, Davila M L, Riviere I, et al: CD19-targeted T cells rapidly induce molecular remissions in adults with chemotherapy-refractory acute lymphoblastic leukemia. Sci Transl Med 5:177ra38, 2013).

[0253] While others have explored additional signaling molecules from tumor necrosis factor (TNF)-family proteins, such as OX40 and 4-1BB, called “third generation” CART cells, (Finney H M, Akbar A N, Lawson A D: Activation of resting human primary T cells with chimeric receptors: costimulation from CD28, inducible costimulator, CD134, and CD137 in series with signals from the TCR zeta chain. J Immunol 172:104-13, 2004; Guedan S, Chen X, Madar A, et al: ICOS-based chimeric antigen receptors program bipolar TH17/TH1 cells. Blood, 2014), other molecules which induce T cell signaling distinct from the CD3ζ nuclear factor of activated T cells (NFAT) pathway may provide necessary costimulation for T cell survival and proliferation, and possibly endow CAR T cells with additional, valuable functions, not supplied by more conventional costimulating molecules. Some second and third-generation CAR T cells have been implicated in patient deaths, due to cytokine storm and tumor lysis syndrome caused by highly activated T cells.

[0254] By “chimeric antigen receptor” or “CAR” is meant, for example, a chimeric polypeptide which comprises a polypeptide sequence that recognizes a target antigen (an antigen-recognition domain) linked to a transmembrane polypeptide and intracellular domain polypeptide selected to activate the T cell and provide specific immunity. The antigen-recognition domain may be a single-chain variable fragment (scFv), or may, for example, be derived from other molecules such as, for example, a T cell receptor or Pattern Recognition Receptor. The intracellular domain comprises at least one polypeptide which causes activation of the T cell, such as, for example, but not limited to, CD3 zeta, and, for example, co-stimulatory molecules, for example, but not limited to, CD28, OX40 and 4-1BB. The term “chimeric antigen receptor” may also refer to chimeric receptors that are not derived from antibodies, but are chimeric T cell receptors. These chimeric T cell receptors may comprise a polypeptide sequence that recognizes a target antigen, where the recognition sequence may be, for example, but not limited to, the recognition sequence derived from a T cell receptor or an scFv. The intracellular domain polypeptides are those that act to activate the T cell. Chimeric T cell receptors are discussed in, for example, Gross, G., and Eshar, Z., FASEB Journal 6:3370-3378 (1992), and Zhang, Y., et al., PLOS Pathogens 6:1-13 (2010).

[0255] In one type of chimeric antigen receptor (CAR), the variable heavy (VH) and light (VL) chains for a tumor-specific monoclonal antibody are fused in-frame with the CD3 zeta chain (ζ) from the T cell receptor complex. The VH and VL are generally connected together using a flexible glycine-serine linker, and then attached to the transmembrane domain by a spacer (CH2CH3) to extend the scFv away from the cell surface so that it can interact with tumor antigens. Following transduction, T cells now express the CAR on their surface, and upon contact and ligation with a tumor antigen, signal through the CD3 zeta chain inducing cytotoxicity and cellular activation.

[0256] Investigators have noted that activation of T cells through CD3 zeta is sufficient to induce a tumor-specific killing, but is insufficient to induce T cell proliferation and survival. Early clinical trials using T cells modified with first generation CARs expressing only the zeta chain showed that gene-modified T cells exhibited poor survival and proliferation in vivo.

[0257] As co-stimulation through the B7 axis is necessary for complete T cell activation, investigators added the co-stimulating polypeptide CD28 signaling domain to the CAR construct. This region generally contains the transmembrane region (in place of the CD3 zeta version) and the YMNM motif for binding PI3K and Lck. In vivo comparisons between T cells expressing CARs with only zeta or CARs with both zeta and CD28 demonstrated that CD28 enhanced expansion in vivo, in part due to increased IL-2 production following activation. The inclusion of CD28 is called a 2nd generation CAR. The most commonly used costimulating molecules include CD28 and 4-1BB, which, following tumor recognition, can initiate a signaling cascade resulting in NF-κB activation, which promotes both T cell proliferation and cell survival.

[0258] The use of co-stimulating polypeptides 4-1BB or OX40 in CAR design has further improved T cell survival and efficacy. 4-1BB in particular appears to greatly enhance T cell proliferation and survival. This 3rd generation design (with 3 signaling domains) has been used in PSMA CARs (Zhong X S, et al., Mol Ther. 2010 February; 18(2):413-20) and in CD19 CARs, most notably for the treatment of CLL (Milone, M. C., et al., (2009) Mol. Ther. 17:1453-1464; Kalos, M., et al., Sci. Transl. Med. (2011) 3:95ra73; Porter, D., et al., (2011) N. Engl. J. Med. 365: 725-533). These cells showed impressive function in 3 patients, expanding more than a 1000-fold in vivo, and resulted in sustained remission in all three patients.

[0259] It is understood that by “derived” is meant that the nucleotide sequence or amino acid sequence may be derived from the sequence of the molecule. The intracellular domain comprises at least one polypeptide which causes activation of the T cell, such as, for example, but not limited to, CD3 zeta, and, for example, co-stimulatory molecules, for example, but not limited to, CD28, OX40 and 4-1BB.

[0260] T cell receptors are molecules composed of two different polypeptides that are on the surface of T cells. They recognize antigens bound to major histocompatibility complex molecules; upon recognition with the antigen, the T cell is activated. By “recognize” is meant, for example, that the T cell receptor, or fragment or fragments thereof, such as TCRα polypeptide and TCRβ together, is capable of contacting the antigen and identifying it as a target. TCRs may comprise α and β polypeptides, or chains. The α and β polypeptides include two extracellular domains, the variable and the constant domains. The variable domain of the α and β polypeptides has three complementarity determining regions (CDRs); CDR3 is considered to be the main CDR responsible for recognizing the epitope. The α polypeptide includes the V and J regions, generated by VJ recombination, and the β polypeptide includes the V, D, and J regions, generated by VDJ recombination. The intersection of the VJ regions and VDJ regions corresponds to the CDR3 region. TCRs are often named using the International Immunogenetics (IMGT) TCR nomenclature (IMGT Database, www.IMGT.org; Giudicelli, V., et al., IMGT/LIGM-DB, the IMGT® comprehensive database of immunoglobulin and T cell receptor nucleotide sequences, Nucl. Acids Res., 34, D781-D784 (2006). PMID: 16381979; T cell Receptor Factsbook, LeFranc and LeFranc, Academic Press ISBN 0-12-441352-8).

[0261] Chimeric T cell receptors may bind to, for example, antigenic polypeptides such as Bob-1, PRAME, and NY-ESO-1. (U.S. patent application Ser. No. 14/930,572, filed Nov. 2, 2015, titled “T Cell Receptors Directed Against Bob1 and Uses Thereof,” and U.S. Provisional Patent Application No. 62/130,884, filed Mar. 10, 2015, titled “T Cell Receptors Directed Against the Preferentially-Expressed Antigen of Melanoma and Uses Thereof, each of which incorporated by reference in its entirety herein).

[0262] In another example of cell therapy, T cells are modified so that they express a non-functional TGF-beta receptor, rendering them resistant to TGF-beta. This allows the modified T cells to avoid the cytotoxicity caused by TGF-beta, and allows the cells to be used in cellular therapy (Bollard, C. J., et al., (2002) Blood 99:3179-3187; Bollard, C. M., et al., (2004) J. Exptl. Med. 200:1623-1633). However, it also could result in a T cell lymphoma, or other adverse effect, as the modified T cells now lack part of the normal cellular control; these therapeutic T cells could themselves become malignant. Transducing these modified T cells with a chimeric Caspase-9-based safety switch as presented herein, would provide a safety switch that could avoid this result.

[0263] In other examples, Natural Killer cells are modified to express the membrane-targeting polypeptide. Instead of a chimeric antigen receptor, in certain embodiments, the heterologous membrane bound polypeptide is a NKG2D receptor. NKG2D receptors can bind to stress proteins (e.g. MICA/B) on tumor cells and can thereby activate NK cells. The extracellular binding domain can also be fused to signaling domains (Barber, A., et al., Cancer Res 2007; 67: 5003-8; Barber A, et al., Exp Hematol. 2008; 36:1318-28; Zhang T., et al., Cancer Res. 2007; 67:11029-36., and this could, in turn, be linked to FRB domains, analogous to FRB-linkered CARs. Moreover, other cell surface receptors, such as VEGF-R could be used as a docking site for FRB domains to enhance tumor-dependent clustering in the presence of hypoxia-triggered VEGF, found at high levels within many tumors.

[0264] Cells used in cellular therapy, that express a heterologous gene, such as a modified receptor, or a chimeric receptor, may be transduced with nucleic acid that encodes a chimeric Caspase-9-based safety switch before, after, or at the same time, as the cells are transduced with the heterologous gene.

### Haploidentical Stem Cell Transplantation

[0265] While stem cell transplantation has proven an effective means of treating a wide variety of diseases involving hematopoietic stem cells and their progeny, a shortage of histocompatible donors has proved a major impediment to the widest application of the approach. The introduction of large panels of unrelated stem cell donors and or cord blood banks has helped to alleviate the problem, but many patients remain unsuited to either source. Even when a matched donor can be found, the elapsed time between commencing the search and collecting the stem cells usually exceeds three months, a delay that may doom many of the neediest patients. Hence there has been considerable interest in making use of HLA haploidentical family donors. Such donors may be parents, siblings or second-degree relatives. The problem of graft rejection may be overcome by a combination of appropriate conditioning and large doses of stem cells, while graft versus host disease (GvHD) may be prevented by extensive T cell-depletion of the donor graft. The immediate outcomes of such procedures have been gratifying, with engraftment rate >90% and a severe GvHD rate of <10% for both adults and children even in the absence of post transplant immunosuppression. Unfortunately, the profound immunosuppression of the grafting procedure, coupled with the extensive T cell-depletion and HLA mismatching between donor and recipient lead to an extremely high rate of post-transplant infectious complications, and contributed to high incidence of disease relapse.

[0266] Donor T cell infusion is an effective strategy for conferring anti-viral and anti-tumor immunity following allogeneic stem cell transplantation. Simple addback of T cells to the patients after haploidentical transplantation, however, cannot work; the frequency of alloreactive T cells is several orders of magnitude higher than the frequency of, for example, virus specific T lymphocytes. Methods are being developed to accelerate immune reconstitution by administrating donor T cells that have first been depleted of alloreactive ceils. One method of achieving this is stimulating donor T cells with recipient EBV-transformed B lymphoblastoid cell lines (LCLs). Alloreactive T cells upregulate CD25 expression, and are eliminated by a CD25 Mab immunotoxin conjugate, RFT5-SMPT-dgA. This compound consists of a murine IgG1 anti-CD25 (IL-2 receptor alpha chain) conjugated via a hetero-bifunctional crosslinker [N-succinimidyloxycarbonyl-alpha-methyl-d-(2-pyridylthio) toluene] to chemically deglycosylated ricin A chain (dgA).

[0267] Treatment with CD25 immunotoxin after LCL stimulation depletes >90% of alloreactive cells. In a phase 1 clinical study, using CD25 immunotoxin to deplete alloreactive lymphocytes immune reconstitution after allodepleted donor T cells were infused at 2 dose levels into recipients of T-cell-depleted haploidentical SCT. Eight patients were treated at 10⁴ cells/kg/dose, and 8 patients received 10⁵ cells/kg/dose. Patients receiving 10⁵ cells/kg/dose showed significantly improved T-cell recovery at 3, 4, and 5 months after SCT compared with those receiving 10⁴ cells/kg/dose (P<0.05). Accelerated T-cell recovery occurred as a result of expansion of the effector memory (CD45RA(−)CCR-7(−)) population (P<0.05), suggesting that protective T-cell responses are likely to be long lived. T-cell-receptor signal joint excision circles (TRECs) were not detected in reconstituting T cells in dose-level 2 patients, indicating they are likely to be derived from the infused allodepleted cells. Spectratyping of the T cells at 4 months demonstrated a polyclonal Vbeta repertoire. Using tetramer and enzyme-linked immunospot (ELISpot) assays, cytomegalovirus (CMV)- and Epstein-Barr virus (EBV)-specific responses in 4 of 6 evaluable patients at dose level 2 as early as 2 to 4 months after transplantation, whereas such responses were not observed until 6 to 12 months in dose-level 1 patients. The incidence of significant acute (2 of 16) and chronic graft-versus-host disease (GvHD; 2 of 15) was low. These data demonstrate that allodepleted donor T cells can be safely used to improve T-cell recovery after haploidentical SCT. The amount of cells infused was subsequently escalated to 10⁶ cells/kg without evidence of GvHD.

[0268] Although this approach reconstituted antiviral immunity, relapse remained a major problem and 6 patients transplanted for high risk leukemia relapsed and died of disease. Higher T cell doses are therefore useful to reconstitute anti-tumor immunity and to provide the hoped-for anti-tumor effect, since the estimated frequency of tumor-reactive precursors is 1 to 2 logs less than frequency of viral-reactive precursors. However, in some patients, these doses of cells will be sufficient to trigger GvHD even after allodepletion (Hurley C K, et al., Biol Blood Marrow Transplant 2003; 9:610-615; Dey B R, et al., Br. J Haematol. 2006; 135:423-437; Aversa F, et al., N Engl J Med 1998; 339:1186-1193; Aversa F, et al., J Clin. On col. 2005; 23:3447-3454; Lang P, Mol. Dis. 2004; 33:281-287; Kolb H J, et al., Blood 2004; 103:767-776; Gottschalk S, et al., Annu. Rev. Med 2005; 56:29-44; Bleakley M, et al., Nat. Rev. Cancer 2004; 4:371-380; Andre-Schmutz I, et al., Lancet 2002; 360:130-137; Solomon S R, et al., Blood 2005; 106:1123-1129; Amrolia P J, et al., Blood 2006; 108:1797-1808; Amrolia P J, et al., Blood 2003; Ghetie V, et al., J Immunol Methods 1991; 142:223-230; Molldrem J J, et al., Cancer Res 1999; 59:2675-2681; Rezvani K, et al., Clin. Cancer Res. 2005; 1 1:8799-8807; Rezvani K, et al., Blood 2003; 102:2892-2900).

### Graft Versus Host Disease (GvHD)

[0269] Graft versus Host Disease is a condition that sometimes occurs after the transplantation of donor immunocompetent cells, for example, T cells, into a recipient. The transplanted cells recognize the recipient's cells as foreign, and attack and destroy them. This condition can be a dangerous effect of T cell transplantation, especially when associated with haploidentical stem cell transplantation. Sufficient T cells should be infused to provide the beneficial effects, such as, for example, the reconstitution of an immune system and the graft anti-tumor effect. But, the number of T cells that can be transplanted can be limited by the concern that the transplant will result in severe graft versus host disease.

[0270] Graft versus Host Disease may be staged as indicated in the following tables:

Staging

| | Stage 0 | Stage 1 | Stage 2 | Stage 3 | Stage 4 |
|---|---|---|---|---|---|
| Skin | No rash | Rash <25% | 25-50% | >50% | Plus bullae and |
| | | BSA | | Generalized | desquamation |
| | | | | erythroderma | |
| Gut | <500 mL | 501-1000 | 1001-1500 | >1500 | Severe |
| (for pediatric | diarrhea/day | mL/day | mL/day | mL/day | abdominal pain |
| patients) | | 5 cc/kg-10 | 10 cc/kg-15 | >15 | and ileus |
| | | cc/kg/day | cc/kg/day | cc/kg/day | |
| UGI | | Severe | | | |
| | | nausea/vomiting | | | |
| Liver | Bilirubins | 2.1-3 | 3.1-6 | 6.1-15 | >15 |
| | 2 mg/di | mg/di | mg/di | mg/di | mg/di |

[0271] Acute GvHD grading may be performed by the consensus conference criteria (Przepiorka D et al., 1994 Consensus Conference on Acute GVHD Grading. Bone Marrow Transplant 1995; 15:825-828).

Grading Index of Acute GvHD

| | Skin | Liver | Gut | Upper GI |
|---|---|---|---|---|
| 0 | None and | None and | None and | None |
| I | Stage 1-2 and | None and | None | None |
| II | Stage 3 and/or | Stage 1 and/or | Stage 1 and/or | Stage 1 |
| III | None-Stage 3 with | Stage 2-3 or | Stage 2-4 | N/A |
| IV | Stage 4 or | Stage 4 | N/A | N/A |

### Inducible Caspase-9 as a “Safety Switch” for Cell Therapy and for Genetically Engineered Cell Transplantation

[0272] By reducing the effect of graft versus host disease is meant, for example, a decrease in the GvHD symptoms so that the patient may be assigned a lower level stage, or, for example, a reduction of a symptom of graft versus host disease by at least 20%, 30%, 40%, 50%, 60%, 70%, 80%, 90%, 95%, or 99%. A reduction in the effect of graft versus host disease may also be measured by detection of a reduction in activated T cells involved in the GvHD reaction, such as, for example, a reduction of cells that express the marker protein, for example CD19, and express CD3 (CD3+CD19⁺ cells, for example) by at least 30%, 40%, 50%, 60%, 70%, 75%, 80%, 85%, 90%, 95%, or 99%.

[0273] Provided herein is an alternative suicide gene strategy that is based on human proapoptotic molecules fused with an FKBP variant that is optimized to bind a chemical inducer of dimerization (CID). Variants may include, for example, an FKBP region that has an amino acid substitution at position 36 selected from the group consisting of valine, leucine, isoleuceine and alanine (Clackson T, et al., Proc Natl Acad Sci USA. 1998, 95:10437-10442). AP1903 is a synthetic molecule that has proven safe in healthy volunteers (Iuliucci J D, et al., J Clin Pharmacol. 2001, 41:870-879). Administration of this small molecule results in cross-linking and activation of the proapoptotic target molecules. The application of this inducible system in human T lymphocytes has been explored using Fas or the death effector domain (DED) of the Fas-associated death domain-containing protein (FADD) as proapoptotic molecules. Up to 90% of T cells transduced with these inducible death molecules underwent apoptosis after administration of CID (Thomis D C, et al., Blood. 2001, 97:1249-1257; Spencer D M, et al., Curr Biol. 1996, 6: 839-847; Fan L, et al., Hum Gene Ther. 1999, 10: 2273-2285; Berger C, et al., Blood. 2004, 103:1261-1269; Junker K, et al., Gene Ther. 2003, 10:1189-197). This suicide gene strategy may be used in any appropriate cell used for cell therapy including, for example, hematopoietic stem cells, and other progenitor cells, including, for example, mesenchymal stromal cells, embryonic stem cells, and inducible pluripotent stem cells. AP20187 and AP1950, a synthetic version of AP1903, may also be used as the ligand inducer. (Amara J F (97) PNAS 94:10618-23, Clontech Laboratories-Takara Bio).

[0274] Therefore, this safety switch, catalyzed by Caspase-9, may be used where there is a condition in the cell therapy patient that requires the removal of the transfected or transduced therapeutic cells. Conditions where the cells may need to be removed include, for example, GvHD, inappropriate differentiation of the cells into more mature cells of the wrong tissue or cell type, and other toxicities. To activate the Caspase-9 switch in the case of inappropriate differentiation, it is possible to use tissue specific promoters. For example, where a progenitor cell differentiates into bone and fat cells, and the fat cells are not desired, the vector used to transfect or transduce the progenitor cell may have a fat cell specific promoter that is operably linked to the Caspase-9 nucleotide sequence. In this way, should the cells differentiate into fat cells, upon administration of the multimer ligand, apoptosis of the inappropriately differentiated fat cells should result. The methods may be used, for example, for any disorder that can be alleviated by cell therapy, including cancer, cancer in the blood or bone marrow, other blood or bone marrow borne diseases such as sickle cell anemia and metachromic leukodystrophy, and any disorder that can be alleviated by a stem cell transplantation, for example blood or bone marrow disorders such as sickle cell anemia or metachromal leukodystrophy.

[0275] The efficacy of adoptive immunotherapy may be enhanced by rendering the therapeutic T cells resistant to immune evasion strategies employed by tumor cells. In vitro studies have shown that this can be achieved by transduction with a dominant-negative receptor or an immunomodulatory cytokine (Bollard C M, et al., Blood. 2002, 99:3179-3187: Wagner H J, et al., Cancer Gene Ther. 2004, 11:81-91). Moreover, transfer of antigen-specific T-cell receptors allows for the application of T-cell therapy to a broader range of tumors (Pule M, et al., Cytotherapy. 2003, 5:211-226; Schumacher T N, Nat Rev Immunol. 2002, 2:512-519). A suicide system for engineered human T cells was developed and tested to allow their subsequent use in clinical studies. Caspase-9 has been modified and shown to be stably expressed in human T lymphocytes without compromising their functional and phenotypic characteristics while demonstrating sensitivity to CID, even in T cells that have upregulated antiapoptotic molecules. (Straathof, K. C., et al., 2005, Blood 105:4248-54).

[0276] In genetically modified cells used for gene therapy, the gene may be a heterologous polynucleotide sequence derived from a source other than the cell that is used to express the gene. The gene is derived from a prokaryotic or eukaryotic source such as a bacterium, a virus, yeast, a parasite, a plant, or even an animal. The heterologous DNA also is derived from more than one source, i.e., a multigene construct or a fusion protein. The heterologous DNA also may include a regulatory sequence, which is derived from one source and the gene from a different source. Or, the heterologous DNA may include regulatory sequences that are used to change the normal expression of a cellular endogenous gene.

### Other Caspase Molecules

[0277] Caspase polypeptides other than Caspase-9 that may be encoded by the chimeric polypeptides of the current technology include, for example, Caspase-1, Caspase-3, and Caspase-8. Discussions of these Caspase polypeptides may be found in, for example, MacCorkle, R. A., et al., Proc. Natl. Acad. Sci. U.S.A. (1998) 95:3655-3660; and Fan, L., et al. (1999) Human Gene Therapy 10:2273-2285).

### Engineering Expression Constructs

[0278] Expression constructs encode a multimeric ligand binding region and a Caspase-9 polypeptide, or, in certain embodiments a multimeric ligand binding region and a Caspase-9 polypeptide linked to a marker polypeptide, all operatively linked. In general, the term “operably linked” is meant to indicate that the promoter sequence is functionally linked to a second sequence, wherein, for example, the promoter sequence initiates and mediates transcription of the DNA corresponding to the second sequence. The Caspase-9 polypeptide may be full length or truncated. In certain embodiments, the marker polypeptide is linked to the Caspase-9 polypeptide. For example, the marker polypeptide may be linked to the Caspase-9 polypeptide via a polypeptide sequence, such as, for example, a cleavable 2A-like sequence. The marker polypeptide may be, for example, CD19, or may be, for example, a heterologous protein, selected to not affect the activity of the chimeric caspase polypeptide.

[0279] In some embodiments, the polynucleotide may encode the Caspase-9 polypeptide and a heterologous protein, which may be, for example a marker polypeptide and may be, for example, a chimeric antigen receptor. The heterologous polypeptide, for example, the chimeric antigen receptor, may be linked to the Caspase-9 polypeptide via a polypeptide sequence, such as, for example, a cleavable 2A-like sequence.

[0280] In certain examples, a nucleic acid comprising a polynucleotide coding for a chimeric antigen receptor is included in the same vector, such as, for example, a viral or plasmid vector, as a polynucleotide coding for a second polypeptide. This second polypeptide may be, for example, a caspase polypeptide, as discussed herein, or a marker polypeptide. In these examples, the construct may be designed with one promoter operably linked to a nucleic acid comprising a polynucleotide coding for the two polypeptides, linked by a cleavable 2A polypeptide. In this example, the first and second polypeptides are separated during translation, resulting in a chimeric antigen receptor polypeptide, and the second polypeptide. In other examples, the two polypeptides may be expressed separately from the same vector, where each nucleic acid comprising a polynucleotide coding for one of the polypeptides is operably linked to a separate promoter. In yet other examples, one promoter may be operably linked to the two nucleic acids, directing the production of two separate RNA transcripts, and thus two polypeptides. Therefore, the expression constructs discussed herein may comprise at least one, or at least two promoters. 2A-like sequences, or “cleavable” 2A sequences, are derived from, for example, many different viruses, including, for example, from Thosea asigna. These sequences are sometimes also known as “peptide skipping sequences.” When this type of sequence is placed within a cistron, between two peptides that are intended to be separated, the ribosome appears to skip a peptide bond, in the case of Thosea asigna sequence, the bond between the Gly and Pro amino acids is omitted. This leaves two polypeptides, in this case the Caspase-9 polypeptide and the marker polypeptide. When this sequence is used, the peptide that is encoded 5′ of the 2A sequence may end up with additional amino acids at the carboxy terminus, including the Gly residue and any upstream in the 2A sequence. The peptide that is encoded 3′ of the 2A sequence may end up with additional amino acids at the amino terminus, including the Pro residue and any downstream in the 2A sequence. “2A” or “2A-like” sequences are part of a large family of peptides that can cause peptide bond-skipping. Various 2A sequences have been characterized (e.g., F2A, P2A, T2A), and are examples of 2A-like sequences that may be used in the polypeptides of the present application. In certain embodiments, the 2A linker comprises the amino acid sequence of SEQ ID NO: 614; in certain embodiments the 2A linker consists of the amino acid sequence of SEQ ID NO: 614. In some embodiments, the 2A linker comprises the amino acid sequence of SEQ ID NO: 998; in some embodiments the 2A linker consists of the amino acid sequence of SEQ ID NO: 998. In certain embodiments, the 2A linker further comprises a GSG amino acid sequence (SEQ ID NO: 151) at the amino terminus of the polypeptide, in other embodiments, the 2A linker comprises a GSGPR amino acid sequence (SEQ ID NO: 925) at the amino terminus of the polypeptide. Thus, by a “2A” sequence, the term may refer to the 2A sequence as listed herein, or may also refer to a 2A sequence as listed herein further comprising a GSG (SEQ ID NO: 151) or GSGPR sequence (SEQ ID NO: 925) at the amino terminus of the linker.

[0281] The expression construct may be inserted into a vector, for example a viral vector or plasmid. The steps of the methods provided may be performed using any suitable method; these methods include, without limitation, methods of transducing, transforming, or otherwise providing nucleic acid to the antigen-presenting cell, presented herein. In some embodiments, the truncated Caspase-9 polypeptide is encoded by the nucleotide sequence of SEQ ID NO 8, SEQ ID NO: 23, SEQ ID NO: 25, SEQ ID NO: 27, or a functionally equivalent fragment thereof, with or without DNA linkers, or has the amino acid sequence of SEQ ID NO: 9, SEQ ID NO: 24, SEQ ID NO: 26, or SEQ ID NO: 28 or a functionally equivalent fragment thereof. In some embodiments, the CD19 polypeptide is encoded by the nucleotide sequence of SEQ ID NO 14, or a functionally equivalent fragment thereof, with or without DNA linkers, or has the amino acid sequence of SEQ ID NO: 15, or a functionally equivalent fragment thereof. A functionally equivalent fragment of the Caspase-9 polypeptide has substantially the same ability to induce apoptosis as the polypeptide of SEQ ID NO: 9, with at least 50%, 60%, 70%, 80%, 90%, or 95% of the activity of the polypeptide of SEQ ID NO: 9. A functionally equivalent fragment of the CD19 polypeptide has substantially the same ability as the polypeptide of SEQ ID No: 15, to act as a marker to be used to identify and select transduced or transfected cells, with at least 50%, 60%, 70%, 80%, 90%, or 95% of the marker polypeptide being detected when compared to the polypeptide of SEQ ID NO: 15, using standard detection techniques.

[0282] More particularly, more than one ligand binding domain or multimerizing region may be used in the expression construct. Yet further, the expression construct contains a membrane-targeting sequence. Appropriate expression constructs may include a co-stimulatory polypeptide element on either side of the above FKBP ligand binding elements.

[0283] In certain examples, the polynucleotide coding for the inducible caspase polypeptide is included in the same vector, such as, for example, a viral or plasmid vector, as a polynucleotide coding for a chimeric antigen receptor. In these examples, the construct may be designed with one promoter operably linked to a nucleic acid comprising a nucleotide sequence coding for the two polypeptides, linked by a cleavable 2A polypeptide. In this example, the first and second polypeptides are cleaved after expression, resulting in a chimeric antigen receptor polypeptide and an inducible Caspase-9 polypeptide. In other examples, the two polypeptides may be expressed separately from the same vector, where each nucleic acid comprising a nucleotide sequence coding for one of the polypeptides is operably linked to a separate promoter. In yet other examples, one promoter may be operably linked to the two nucleic acids, directing the production of two separate RNA transcripts, and thus two polypeptides. Therefore, the expression constructs discussed herein may comprise at least one, or at least two promoters.

[0284] In yet other examples, two polypeptides may be expressed in a cell using two separate vectors. The cells may be co-transfected or co-transformed with the vectors, or the vectors may be introduced to the cells at different times.

### Ligand Binding Regions

[0285] The ligand binding (“dimerization”) domain, or multimerizing region, of the expression construct can be any convenient domain that will allow for induction using a natural or unnatural ligand, for example, an unnatural synthetic ligand. The multimerizing region can be internal or external to the cellular membrane, depending upon the nature of the construct and the choice of ligand. A wide variety of ligand binding proteins, including receptors, are known, including ligand binding proteins associated with the cytoplasmic regions indicated above. As used herein the term “ligand binding domain” can be interchangeable with the term “receptor”. Of particular interest are ligand binding proteins for which ligands (for example, small organic ligands) are known or may be readily produced. These ligand binding domains or receptors include the FKBPs and cyclophilin receptors, the steroid receptors, the tetracycline receptor, the other receptors indicated above, and the like, as well as “unnatural” receptors, which can be obtained from antibodies, particularly the heavy or light chain subunit, mutated sequences thereof, random amino acid sequences obtained by stochastic procedures, combinatorial syntheses, and the like. In certain embodiments, the ligand binding region is selected from the group consisting of FKBP ligand binding region, cyclophilin receptor ligand binding region, steroid receptor ligand binding region, cyclophilin receptors ligand binding region, and tetracycline receptor ligand binding region. Often, the ligand binding region comprises a F_{v′}fᵥₗₛ sequence. Sometimes, the F_{V}fᵥₗₛ sequence further comprises an additional F_{v′} sequence. Examples include, for example, those discussed in Kopytek, S. J., et al., Chemistry & Biology 7:313-321 (2000) and in Gestwicki, J. E., et al., Combinatorial Chem. & High Throughput Screening 10:667-675 (2007); Clackson T (2006) Chem Biol Drug Des 67:440-2; Clackson, T., in Chemical Biology: From Small Molecules to Systems Biology and Drug Design (Schreiber, s., et al., eds., Wiley, 2007)).

[0286] For the most part, the ligand binding domains or receptor domains will be at least about 50 amino acids, and fewer than about 350 amino acids, usually fewer than 200 amino acids, either as the natural domain or truncated active portion thereof. The binding domain may, for example, be small (<25 kDa, to allow efficient transfection in viral vectors), monomeric, nonimmunogenic, have synthetically accessible, cell permeable, nontoxic ligands that can be configured for dimerization.

[0287] The receptor domain can be intracellular or extracellular depending upon the design of the expression construct and the availability of an appropriate ligand. For hydrophobic ligands, the binding domain can be on either side of the membrane, but for hydrophilic ligands, particularly protein ligands, the binding domain will usually be external to the cell membrane, unless there is a transport system for internalizing the ligand in a form in which it is available for binding. For an intracellular receptor, the construct can encode a signal peptide and transmembrane domain 5′ or 3′ of the receptor domain sequence or may have a lipid attachment signal sequence 5′ of the receptor domain sequence. Where the receptor domain is between the signal peptide and the transmembrane domain, the receptor domain will be extracellular.

[0288] The portion of the expression construct encoding the receptor can be subjected to mutagenesis for a variety of reasons. The mutagenized protein can provide for higher binding affinity, allow for discrimination by the ligand of the naturally occurring receptor and the mutagenized receptor, provide opportunities to design a receptor-ligand pair, or the like. The change in the receptor can involve changes in amino acids known to be at the binding site, random mutagenesis using combinatorial techniques, where the codons for the amino acids associated with the binding site or other amino acids associated with conformational changes can be subject to mutagenesis by changing the codon(s) for the particular amino acid, either with known changes or randomly, expressing the resulting proteins in an appropriate prokaryotic host and then screening the resulting proteins for binding.

[0289] Antibodies and antibody subunits, e.g., heavy or light chain, particularly fragments, more particularly all or part of the variable region, or fusions of heavy and light chain to create high-affinity binding, can be used as the binding domain. Antibodies that are contemplated include ones that are an ectopically expressed human product, such as an extracellular domain that would not trigger an immune response and generally not expressed in the periphery (i.e., outside the CNS/brain area). Such examples, include, but are not limited to low affinity nerve growth factor receptor (LNGFR), and embryonic surface proteins (i.e., carcinoembryonic antigen). Yet further, antibodies can be prepared against haptenic molecules, which are physiologically acceptable, and the individual antibody subunits screened for binding affinity. The cDNA encoding the subunits can be isolated and modified by deletion of the constant region, portions of the variable region, mutagenesis of the variable region, or the like, to obtain a binding protein domain that has the appropriate affinity for the ligand. In this way, almost any physiologically acceptable haptenic compound can be employed as the ligand or to provide an epitope for the ligand. Instead of antibody units, natural receptors can be employed, where the binding domain is known and there is a useful ligand for binding.

### Oligomerization

[0290] The transduced signal will normally result from ligand-mediated oligomerization of the chimeric protein molecules, i.e., as a result of oligomerization following ligand binding, although other binding events, for example allosteric activation, can be employed to initiate a signal. The construct of the chimeric protein will vary as to the order of the various domains and the number of repeats of an individual domain.

[0291] For multimerizing the receptor, the ligand for the ligand binding domains/receptor domains of the chimeric surface membrane proteins will usually be multimeric in the sense that it will have at least two binding sites, with each of the binding sites capable of binding to the ligand receptor domain. By “multimeric ligand binding region” is meant a ligand binding region that binds to a multimeric ligand. The term “multimeric ligands” include dimeric ligands. A dimeric ligand will have two binding sites capable of binding to the ligand receptor domain. Desirably, the subject ligands will be a dimer or higher order oligomer, usually not greater than about tetrameric, of small synthetic organic molecules, the individual molecules typically being at least about 150 Da and less than about 5 kDa, usually less than about 3 kDa. A variety of pairs of synthetic ligands and receptors can be employed. For example, in embodiments involving natural receptors, dimeric FK506 can be used with an FKBP12 receptor, dimerized cyclosporin A can be used with the cyclophilin receptor, dimerized estrogen with an estrogen receptor, dimerized glucocorticoids with a glucocorticoid receptor, dimerized tetracycline with the tetracycline receptor, dimerized vitamin D with the vitamin D receptor, and the like. Alternatively, higher orders of the ligands, e.g., trimeric can be used. For embodiments involving unnatural receptors, e.g., antibody subunits, modified antibody subunits, single chain antibodies comprised of heavy and light chain variable regions in tandem, separated by a flexible linker domain, or modified receptors, and mutated sequences thereof, and the like, any of a large variety of compounds can be used. A significant characteristic of these ligand units is that each binding site is able to bind the receptor with high affinity and they are able to be dimerized chemically. Also, methods are available to balance the hydrophobicity/hydrophilicity of the ligands so that they are able to dissolve in serum at functional levels, yet diffuse across plasma membranes for most applications.

[0292] In certain embodiments, the present methods utilize the technique of chemically induced dimerization (CID) to produce a conditionally controlled protein or polypeptide. In addition to this technique being inducible, it also is reversible, due to the degradation of the labile dimerizing agent or administration of a monomeric competitive inhibitor.

[0293] The CID system uses synthetic bivalent ligands to rapidly crosslink signaling molecules that are fused to ligand binding domains. This system has been used to trigger the oligomerization and activation of cell surface (Spencer, D. M., et al., Science, 1993. 262: p. 1019-1024; Spencer D. M. et al., Curr Biol 1996, 6:839-847; Blau, C. A. et al., Proc Natl Acad. Sci. USA 1997, 94:3076-3081), or cytosolic proteins (Luo, Z. et al., Nature 1996, 383:181-185; MacCorkle, R. A. et al., Proc Natl Acad Sci USA 1998, 95:3655-3660), the recruitment of transcription factors to DNA elements to modulate transcription (Ho, S. N. et al., Nature 1996, 382:822-826; Rivera, V. M. et al., Nat. Med. 1996, 2:1028-1032) or the recruitment of signaling molecules to the plasma membrane to stimulate signaling (Spencer D. M. et al., Proc. Natl. Acad. Sci. USA 1995, 92:9805-9809; Holsinger, L. J. et al., Proc. Natl. Acad. Sci. USA 1995, 95:9810-9814).

[0294] The CID system is based upon the notion that surface receptor aggregation effectively activates downstream signaling cascades. In the simplest embodiment, the CID system uses a dimeric analog of the lipid permeable immunosuppressant drug, FK506, which loses its normal bioactivity while gaining the ability to crosslink molecules genetically fused to the FK506-binding protein, FKBP12. By fusing one or more FKBPs to Caspase-9, one can stimulate Caspase-9 activity in a dimerizer drug-dependent, but ligand and ectodomain-independent manner. This provides the system with temporal control, reversibility using monomeric drug analogs, and enhanced specificity. The high affinity of third-generation AP20187/AP1903 CIDs for their binding domain, FKBP12, permits specific activation of the recombinant receptor in vivo without the induction of non-specific side effects through endogenous FKBP12. FKBP12 variants having amino acid substitutions and deletions, such as FKBP12v36, that bind to a dimerizer drug, may also be used. FKBP12 variants include, but are not limited to, those having amino acid substitutions at position 36, selected from the group consisting of valine, leucine, isoleuceine, and alanine. In addition, the synthetic ligands are resistant to protease degradation, making them more efficient at activating receptors in vivo than most delivered protein agents.

[0295] By FKBP12 is meant the wild type FKBP12 polypeptide, or analogs or derivatives thereof that may comprise amino acid substitutions, that maintains FKBP12 binding activity to rapamycin; FKBP12 polypeptides or polypeptide regions bind to rimiducid with at least 100 times less affinity than FKBP12v36 polypeptides. In some examples, the FKBP12 polypeptide binds to a ligand, such as rimiducid, with at least 100 times less affinity than an FKBP12 variant polypeptide consisting of the amino acid sequence of SEQ ID NO: 977.

[0296] By FKBP12 variant polypeptide if meant an FKBP12 polypeptide that binds to a ligand, such as rimiducid with at least 100 times more affinity than a wild type FKBP12 polypeptide, such as, for example, the wild type FKBP12 polypeptide consisting of the amino acid sequence of SEQ ID NO: 929.

[0297] The ligands used are capable of binding to two or more of the ligand binding domains. The chimeric proteins may be able to bind to more than one ligand when they contain more than one ligand binding domain. The ligand is typically a non-protein or a chemical. Exemplary ligands include, but are not limited to FK506 (e.g., FK1012).

[0298] Other ligand binding regions may be, for example, dimeric regions, or modified ligand binding regions with a wobble substitution, such as, for example, FKBP12(V36): The human 12 kDa FK506-binding protein with an F36 to V substitution, the complete mature coding sequence (amino acids 1-107), provides a binding site for synthetic dimerizer drug AP1903 (Jemal, A. et al., CA Cancer J. Clinic. 58, 71-96 (2008); Scher, H. I. and Kelly, W. K., Journal of Clinical Oncology 11, 1566-72 (1993)). Two tandem copies of the protein may also be used in the construct so that higher-order oligomers are induced upon cross-linking by AP1903.

[0299] FKBP12 variants may also be used in the FKBP12/FRB multimerizing regions. Variants used in these fusions, in some embodiments, will bind to rapamycin, or rapalogs, but will bind to less affinity to rimiducid than, for example, FKBP12v36. Examples of FKBP12 variants include those from many species, including, for example, yeast. In one embodiment, the FKBP12 variant is FKBP12.6 (calstablin).

[0300] Other heterodimers are contemplated in the present application. In one embodiment, a calcineurin-A polypeptide, or region may be used in place of the FRB multimerizing region. In some embodiments, the first unit of the first multimerizing region is a calcineurin-A polypeptide. In some embodiments, the first unit of the first multimerizing region is a calcineurin-A polypeptide region and the second unit of the first multimerizing region is a FKBP12 or FKBP12 variant multimerizing region. In some embodiments, the first unit of the first multimerizing region is a FKBP12 or FKBP12 variant multimerizing region and the second unit of the first multimerizing region is a calcineuring-A polypeptide region. In these embodiments, the first ligand comprises, for example, cyclosporine.

[0301] F36V′-FKBP: F36V′-FKBP is a codon-wobbled version of F36V-FKBP. It encodes the identical polypeptide sequence as F36V-FKPB but has only 62% homology at the nucleotide level. F36V′-FKBP was designed to reduce recombination in retroviral vectors (Schellhammer, P. F. et al., J. Urol. 157, 1731-5 (1997)). F36V′-FKBP was constructed by a PCR assembly procedure. The transgene contains one copy of F36V′-FKBP linked directly to one copy of F36V-FKBP.

[0302] In some embodiments, the ligand is a small molecule. The appropriate ligand for the selected ligand binding region may be selected. Often, the ligand is dimeric, sometimes, the ligand is a dimeric FK506 or a dimeric FK506-like analog. In certain embodiments, the ligand is AP1903 (CAS Index Name: 2-Piperidinecarboxylic acid, 1-[(2S)-1-oxo-2-(3,4,5-trimethoxyphenyl)butyl]-, 1,2-ethanediylbis[imino(2-oxo-2,1-ethanediyl)oxy-3,1-phenylene[(1R)-3-(3,4-dimethoxyphenyl)propylidene]] ester, [2S-[1(R*),2R*[S*[S*[1(R*),2R*]]]]]-(9Cl) CAS Registry Number: 195514-63-7; Molecular Formula: C78H98N4O20 Molecular Weight: 1411.65). In certain embodiments, the ligand is AP20187. In certain embodiments, the ligand is an AP20187 analog, such as, for example, AP1510. In some embodiments, certain analogs will be appropriate for the FKBP12, and certain analogs appropriate for the wobbled version of FKBP12. In certain embodiments, one ligand binding region is included in the chimeric protein. In other embodiments, two or more ligand binding regions are included. Where, for example, the ligand binding region is FKBP12, where two of these regions are included, one may, for example, be the wobbled version.

[0303] Other dimerization systems contemplated include the coumermycin/DNA gyrase B system. Coumermycin-induced dimerization activates a modified Raf protein and stimulating the MAP kinase cascade. See Farrar, M. A., et. Al., (1996) Nature 383, 178-181. In other embodiments, the abscisic acid (ABA) system developed by GR Crabtree and colleagues (Liang F S, et al., Sci Signal. 2011 Mar. 15; 4(164):rs2), may be used, but like DNA gyrase B, this relies on a foreign protein, which would be immunogenic.

### Membrane-Targeting

[0304] A membrane-targeting sequence or region provides for transport of the chimeric protein to the cell surface membrane, where the same or other sequences can encode binding of the chimeric protein to the cell surface membrane. Molecules in association with cell membranes contain certain regions that facilitate the membrane association, and such regions can be incorporated into a chimeric protein molecule to generate membrane-targeted molecules. For example, some proteins contain sequences at the N-terminus or C-terminus that are acylated, and these acyl moieties facilitate membrane association. Such sequences are recognized by acyltransferases and often conform to a particular sequence motif. Certain acylation motifs are capable of being modified with a single acyl moiety (often followed by several positively charged residues (e.g. human c-Src: M-G-S-N-K-S-K-P-K-D-A-S-Q-R-R-R (SEQ ID NO: 283)) to improve association with anionic lipid head groups) and others are capable of being modified with multiple acyl moieties. For example, the N-terminal sequence of the protein tyrosine kinase Src can comprise a single myristoyl moiety. Dual acylation regions are located within the N-terminal regions of certain protein kinases, such as a subset of Src family members (e.g., Yes, Fyn, Lck) and G-protein alpha subunits. Such dual acylation regions often are located within the first eighteen amino acids of such proteins, and conform to the sequence motif Met-Gly-Cys-Xaa-Cys (SEQ ID NO: 284), where the Met is cleaved, the Gly is N-acylated and one of the Cys residues is S-acylated. The Gly often is myristoylated and a Cys can be palmitoylated. Acylation regions conforming to the sequence motif Cys-Ala-Ala-Xaa (so called “CAAX boxes”), which can modified with C15 or C10 isoprenyl moieties, from the C-terminus of G-protein gamma subunits and other proteins (e.g., World Wde Web address ebi.ac.uk/interpro/DisplaylproEntry?ac=1PR001230) also can be utilized. These and other acylation motifs include, for example, those discussed in Gauthier-Campbell et al., Molecular Biology of the Cell 15: 2205-2217 (2004); Glabati et al., Biochem. J. 303: 697-700 (1994) and Zlakine et al., J. Cell Science 110: 673-679 (1997), and can be incorporated in chimeric molecules to induce membrane localization. In certain embodiments, a native sequence from a protein containing an acylation motif is incorporated into a chimeric protein. For example, in some embodiments, an N-terminal portion of Lck, Fyn or Yes or a G-protein alpha subunit, such as the first twenty-five N-terminal amino acids or fewer from such proteins (e.g., about 5 to about 20 amino acids, about 10 to about 19 amino acids, or about 15 to about 19 amino acids of the native sequence with optional mutations), may be incorporated within the N-terminus of a chimeric protein. In certain embodiments, a C-terminal sequence of about 25 amino acids or less from a G-protein gamma subunit containing a CAAX box motif sequence (e.g., about 5 to about 20 amino acids, about 10 to about 18 amino acids, or about 15 to about 18 amino acids of the native sequence with optional mutations) can be linked to the C-terminus of a chimeric protein.

[0305] In some embodiments, an acyl moiety has a log p value of +1 to +6, and sometimes has a log p value of +3 to +4.5. Log p values are a measure of hydrophobicity and often are derived from octanol/water partitioning studies, in which molecules with higher hydrophobicity partition into octanol with higher frequency and are characterized as having a higher log p value. Log p values are published for a number of lipophilic molecules and log p values can be calculated using known partitioning processes (e.g., Chemical Reviews, Vol. 71, Issue 6, page 599, where entry 4493 shows lauric acid having a log p value of 4.2). Any acyl moiety can be linked to a peptide composition discussed above and tested for antimicrobial activity using known methods and those discussed hereafter. The acyl moiety sometimes is a C1-C20 alkyl, C2-C20 alkenyl, C2-C20 alkynyl, C3-C6 cycloalkyl, C1-C4 haloalkyl, C4-C12 cyclalkylalkyl, aryl, substituted aryl, or aryl (C1-C4) alkyl, for example. Any acyl-containing moiety sometimes is a fatty acid, and examples of fatty acid moieties are propyl (C3), butyl (C4), pentyl (C5), hexyl (C6), heptyl (C7), octyl (C8), nonyl (C9), decyl (C10), undecyl (C11), lauryl (C12), myristyl (C14), palmityl (C16), stearyl (C18), arachidyl (C20), behenyl (C22) and lignoceryl moieties (C24), and each moiety can contain 0, 1, 2, 3, 4, 5, 6, 7 or 8 unsaturations (i.e., double bonds). An acyl moiety sometimes is a lipid molecule, such as a phosphatidyl lipid (e.g., phosphatidyl serine, phosphatidyl inositol, phosphatidyl ethanolamine, phosphatidyl choline), sphingolipid (e.g., shingomyelin, sphingosine, ceramide, ganglioside, cerebroside), or modified versions thereof. In certain embodiments, one, two, three, four or five or more acyl moieties are linked to a membrane association region.

[0306] A chimeric protein herein also may include a single-pass or multiple pass transmembrane sequence (e.g., at the N-terminus or C-terminus of the chimeric protein). Single pass transmembrane regions are found in certain CD molecules, tyrosine kinase receptors, serine/threonine kinase receptors, TGFbeta, BMP, activin and phosphatases. Single pass transmembrane regions often include a signal peptide region and a transmembrane region of about 20 to about 25 amino acids, many of which are hydrophobic amino acids and can form an alpha helix. A short track of positively charged amino acids often follows the transmembrane span to anchor the protein in the membrane. Multiple pass proteins include ion pumps, ion channels, and transporters, and include two or more helices that span the membrane multiple times. All or substantially all of a multiple pass protein sometimes is incorporated in a chimeric protein. Sequences for single pass and multiple pass transmembrane regions are known and can be selected for incorporation into a chimeric protein molecule.

[0307] Any membrane-targeting sequence can be employed that is functional in the host and may, or may not, be associated with one of the other domains of the chimeric protein. In some embodiments, such sequences include, but are not limited to myristoylation-targeting sequence, palmitoylation-targeting sequence, prenylation sequences (i.e., farnesylation, geranyl-geranylation, CAAX Box), protein-protein interaction motifs or transmembrane sequences (utilizing signal peptides) from receptors. Examples include those discussed in, for example, ten Klooster J P et al, Biology of the Cell (2007) 99, 1-12, Vincent, S., et al., Nature Biotechnology 21:936-40, 1098 (2003).

[0308] Additional protein domains exist that can increase protein retention at various membranes. For example, an ˜120 amino acid pleckstrin homology (PH) domain is found in over 200 human proteins that are typically involved in intracellular signaling. PH domains can bind various phosphatidylinositol (PI) lipids within membranes (e.g. PI (3, 4, 5)-P3, PI (3,4)-P2, PI (4,5)-P2) and thus play a key role in recruiting proteins to different membrane or cellular compartments. Often the phosphorylation state of PI lipids is regulated, such as by PI-3 kinase or PTEN, and thus, interaction of membranes with PH domains are not as stable as by acyl lipids.

[0309] AP1903 for Injection

[0310] AP1903 API is manufactured by Alphora Research Inc. and AP1903 Drug Product for Injection is made by Formatech Inc. It is formulated as a 5 mg/mL solution of AP1903 in a 25% solution of the non-ionic solubilizer Solutol HS 15 (250 mg/mL, BASF). At room temperature, this formulation is a clear, slightly yellow solution. Upon refrigeration, this formulation undergoes a reversible phase transition, resulting in a milky solution. This phase transition is reversed upon re-warming to room temperature. The fill is 2.33 mL in a 3 mL glass vial (˜10 mg AP1903 for Injection total per vial).

[0311] AP1903 is removed from the refrigerator the night before the patient is dosed and stored at a temperature of approximately 21° C. overnight, so that the solution is clear prior to dilution. The solution is prepared within 30 minutes of the start of the infusion in glass or polyethylene bottles or non-DEHP bags and stored at approximately 21° C. prior to dosing.

[0312] All study medication is maintained at a temperature between 2 degrees C. and 8 degrees C., protected from excessive light and heat, and stored in a locked area with restricted access. Upon determining a need to administer AP1903 and induce the inducible Caspase-9 polypeptide, patients may be, for example, administered a single fixed dose of AP1903 for Injection (0.4 mg/kg) via IV infusion over 2 hours, using a non-DEHP, non-ethylene oxide sterilized infusion set. The dose of AP1903 is calculated individually for all patients, and is not to be recalculated unless body weight fluctuates by 10%. The calculated dose is diluted in 100 mL in 0.9% normal saline before infusion.

[0313] In a previous Phase 1 study of AP1903, 24 healthy volunteers were treated with single doses of AP1903 for Injection at dose levels of 0.01, 0.05, 0.1, 0.5 and 1.0 mg/kg infused IV over 2 hours. AP1903 plasma levels were directly proportional to dose, with mean Cₘₐₓ values ranging from approximately 10-1275 ng/mL over the 0.01-1.0 mg/kg dose range. Following the initial infusion period, blood concentrations demonstrated a rapid distribution phase, with plasma levels reduced to approximately 18, 7, and 1% of maximal concentration at 0.5, 2 and 10 hours post-dose, respectively. AP1903 for Injection was shown to be safe and well tolerated at all dose levels and demonstrated a favorable pharmacokinetic profile. Iuliucci J D, et al., J Clin Pharmacol. 41: 870-9, 2001.

[0314] The fixed dose of AP1903 for injection used, for example, may be 0.4 mg/kg intravenously infused over 2 hours. The amount of AP1903 needed in vitro for effective signaling of cells is 10-100 nM (1600 Da MVV). This equates to 16-160 μg/L or ˜0.016-1.6 mg/kg (1.6-160 μg/kg). Doses up to 1 mg/kg were well-tolerated in the Phase 1 study of AP1903 discussed above. Therefore, 0.4 mg/kg may be a safe and effective dose of AP1903 for this Phase I study in combination with the therapeutic cells.

### Selectable Markers

[0315] In certain embodiments, the expression constructs contain nucleic acid constructs whose expression is identified in vitro or in vivo by including a marker in the expression construct. Such markers would confer an identifiable change to the cell permitting easy identification of cells containing the expression construct. Usually the inclusion of a drug selection marker aids in cloning and in the selection of transformants. For example, genes that confer resistance to neomycin, puromycin, hygromycin, DHFR, GPT, zeocin and histidinol are useful selectable markers. Alternatively, enzymes such as Herpes Simplex Virus-I thymidine kinase (tk) are employed. Immunologic surface markers containing the extracellular, non-signaling domains or various proteins (e.g. CD34, CD19, LNGFR) also can be employed, permitting a straightforward method for magnetic or fluorescence antibody-mediated sorting. The selectable marker employed is not believed to be important, so long as it is capable of being expressed simultaneously with the nucleic acid encoding a gene product. Further examples of selectable markers include, for example, reporters such as GFP, EGFP, beta-gal or chloramphenicol acetyltransferase (CAT). In certain embodiments, the marker protein, such as, for example, CD19 is used for selection of the cells for transfusion, such as, for example, in immunomagnetic selection. As discussed herein, a CD19 marker is distinguished from an anti-CD19 antibody, or, for example, an scFv, TCR, or other antigen recognition moiety that binds to CD19.

[0316] In some embodiments, a polypeptide may be included in the expression vector to aid in sorting cells. For example, the CD34 minimal epitope may be incorporated into the vector. In some embodiments, the expression vectors used to express the chimeric antigen receptors or chimeric stimulating molecules provided herein further comprise a polynucleotide that encodes the 16 amino acid CD34 minimal epitope. In some embodiments, such as certain embodiments provided in the examples herein, the CD34 minimal epitope is incorporated at the amino terminal position of the CD8 stalk.

[0317] Transmembrane Regions

[0318] A chimeric antigen receptor herein may include a single-pass or multiple pass transmembrane sequence (e.g., at the N-terminus or C-terminus of the chimeric protein). Single pass transmembrane regions are found in certain CD molecules, tyrosine kinase receptors, serine/threonine kinase receptors, TGFβ, BMP, activin and phosphatases. Single pass transmembrane regions often include a signal peptide region and a transmembrane region of about 20 to about 25 amino acids, many of which are hydrophobic amino acids and can form an alpha helix. A short track of positively charged amino acids often follows the transmembrane span to anchor the protein in the membrane. Multiple pass proteins include ion pumps, ion channels, and transporters, and include two or more helices that span the membrane multiple times. All or substantially all of a multiple pass protein sometimes is incorporated in a chimeric protein. Sequences for single pass and multiple pass transmembrane regions are known and can be selected for incorporation into a chimeric protein molecule.

[0319] In some embodiments, the transmembrane domain is fused to the extracellular domain of the CAR. In one embodiment, the transmembrane domain that naturally is associated with one of the domains in the CAR is used. In other embodiments, a transmembrane domain that is not naturally associated with one of the domains in the CAR is used. In some instances, the transmembrane domain can be selected or modified by amino acid substitution (e.g., typically charged to a hydrophobic residue) to avoid binding of such domains to the transmembrane domains of the same or different surface membrane proteins to minimize interactions with other members of the receptor complex.

[0320] Transmembrane domains may, for example, be derived from the alpha, beta, or zeta chain of the T cell receptor, CD3-ε, CD3ζ, CD4, CD5, CD8, CD8a, CD9, CD16, CD22, CD28, CD33, CD38, CD64, CD80, CD86, CD134, CD137, or CD154. Or, in some examples, the transmembrane domain may be synthesized de novo, comprising mostly hydrophobic residues, such as, for example, leucine and valine. In certain embodiments a short polypeptide linker may form the linkage between the transmembrane domain and the intracellular domain of the chimeric antigen receptor. The chimeric antigen receptors may further comprise a stalk, that is, an extracellular region of amino acids between the extracellular domain and the transmembrane domain. For example, the stalk may be a sequence of amino acids naturally associated with the selected transmembrane domain. In some embodiments, the chimeric antigen receptor comprises a CD8 transmembrane domain, in certain embodiments, the chimeric antigen receptor comprises a CD8 transmembrane domain, and additional amino acids on the extracellular portion of the transmembrane domain, in certain embodiments, the chimeric antigen receptor comprises a CD8 transmembrane domain and a CD8 stalk. The chimeric antigen receptor may further comprise a region of amino acids between the transmembrane domain and the cytoplasmic domain, which are naturally associated with the polypeptide from which the transmembrane domain is derived.

[0321] Control Regions

### Promoters

[0322] The particular promoter employed to control the expression of a polynucleotide sequence of interest is not believed to be important, so long as it is capable of directing the expression of the polynucleotide in the targeted cell. Thus, where a human cell is targeted the polynucleotide sequence-coding region may, for example, be placed adjacent to and under the control of a promoter that is capable of being expressed in a human cell. Generally speaking, such a promoter might include either a human or viral promoter.

[0323] In various embodiments, the human cytomegalovirus (CMV) immediate early gene promoter, the SV40 early promoter, the Rous sarcoma virus long terminal repeat, β-actin, rat insulin promoter and glyceraldehyde-3-phosphate dehydrogenase can be used to obtain high-level expression of the coding sequence of interest. The use of other viral or mammalian cellular or bacterial phage promoters which are well known in the art to achieve expression of a coding sequence of interest is contemplated as well, provided that the levels of expression are sufficient for a given purpose. By employing a promoter with well-known properties, the level and pattern of expression of the protein of interest following transfection or transformation can be optimized.

[0324] Selection of a promoter that is regulated in response to specific physiologic or synthetic signals can permit inducible expression of the gene product. For example, in the case where expression of a transgene, or transgenes when a multicistronic vector is utilized, is toxic to the cells in which the vector is produced in, it is desirable to prohibit or reduce expression of one or more of the transgenes. Examples of transgenes that are toxic to the producer cell line are pro-apoptotic and cytokine genes. Several inducible promoter systems are available for production of viral vectors where the transgene products are toxic (add in more inducible promoters).

[0325] The ecdysone system (Invitrogen, Carlsbad, Calif.) is one such system. This system is designed to allow regulated expression of a gene of interest in mammalian cells. It consists of a tightly regulated expression mechanism that allows virtually no basal level expression of the transgene, but over 200-fold inducibility. The system is based on the heterodimeric ecdysone receptor of Drosophila, and when ecdysone or an analog such as muristerone A binds to the receptor, the receptor activates a promoter to turn on expression of the downstream transgene high levels of mRNA transcripts are attained. In this system, both monomers of the heterodimeric receptor are constitutively expressed from one vector, whereas the ecdysone-responsive promoter, which drives expression of the gene of interest, is on another plasmid. Engineering of this type of system into the gene transfer vector of interest would therefore be useful. Cotransfection of plasmids containing the gene of interest and the receptor monomers in the producer cell line would then allow for the production of the gene transfer vector without expression of a potentially toxic transgene. At the appropriate time, expression of the transgene could be activated with ecdysone or muristeron A.

[0326] Another inducible system that may be useful is the Tet-Off™ or Tet-On™ system (Clontech, Palo Alto, Calif.) originally developed by Gossen and Bujard (Gossen and Bujard, Proc. Natl. Acad. Sci. USA, 89:5547-5551, 1992; Gossen et al., Science, 268:1766-1769, 1995). This system also allows high levels of gene expression to be regulated in response to tetracycline or tetracycline derivatives such as doxycycline. In the Tet-On™ system, gene expression is turned on in the presence of doxycycline, whereas in the Tet-Off™ system, gene expression is turned on in the absence of doxycycline. These systems are based on two regulatory elements derived from the tetracycline resistance operon of E. coli, he tetracycline operator sequence to which the tetracycline repressor binds, and the tetracycline repressor protein. The gene of interest is cloned into a plasmid behind a promoter that has tetracycline-responsive elements present in it. A second plasmid contains a regulatory element called the tetracycline-controlled transactivator, which is composed, in the Tet-Off™ system, of the VP16 domain from the herpes simplex virus and the wild-type tertracycline repressor. Thus in the absence of doxycycline, transcription is constitutively on. In the Tet-On™ system, the tetracycline repressor is not wild type and in the presence of doxycycline activates transcription. For gene therapy vector production, the Tet-Off™ system may be used so that the producer cells could be grown in the presence of tetracycline or doxycycline and prevent expression of a potentially toxic transgene, but when the vector is introduced to the patient, the gene expression would be constitutively on.

[0327] In some circumstances, it is desirable to regulate expression of a transgene in a gene therapy vector. For example, different viral promoters with varying strengths of activity are utilized depending on the level of expression desired. In mammalian cells, the CMV immediate early promoter is often used to provide strong transcriptional activation. The CMV promoter is reviewed in Donnelly, J. J., et al., 1997. Annu. Rev. Immunol. 15:617-48. Modified versions of the CMV promoter that are less potent have also been used when reduced levels of expression of the transgene are desired. When expression of a transgene in hematopoietic cells is desired, retroviral promoters such as the LTRs from MLV or MMTV are often used. Other viral promoters that are used depending on the desired effect include SV40, RSV LTR, HIV-1 and HIV-2 LTR, adenovirus promoters such as from the E1A, E2A, or MLP region, AAV LTR, HSV-TK, and avian sarcoma virus.

[0328] In other examples, promoters may be selected that are developmentally regulated and are active in particular differentiated cells. Thus, for example, a promoter may not be active in a pluripotent stem cell, but, for example, where the pluripotent stem cell differentiates into a more mature cell, the promoter may then be activated.

[0329] Similarly tissue specific promoters are used to effect transcription in specific tissues or cells so as to reduce potential toxicity or undesirable effects to non-targeted tissues. These promoters may result in reduced expression compared to a stronger promoter such as the CMV promoter, but may also result in more limited expression, and immunogenicity (Bojak, A., et al., 2002. Vaccine. 20:1975-79; Cazeaux., N., et al., 2002. Vaccine 20:3322-31). For example, tissue specific promoters such as the PSA associated promoter or prostate-specific glandular kallikrein, or the muscle creatine kinase gene may be used where appropriate.

[0330] Examples of tissue specific or differentiation specific promoters include, but are not limited to, the following: B29 (B cells); CD14 (monocytic cells); CD43 (leukocytes and platelets); CD45 (hematopoietic cells); CD68 (macrophages); desmin (muscle); elastase-1 (pancreatic acinar cells); endoglin (endothelial cells); fibronectin (differentiating cells, healing tissues); and Flt-1 (endothelial cells); GFAP (astrocytes).

[0331] In certain indications, it is desirable to activate transcription at specific times after administration of the gene therapy vector. This is done with such promoters as those that are hormone or cytokine regulatable. Cytokine and inflammatory protein responsive promoters that can be used include K and T kininogen (Kageyama et al., (1987) J. Biol. Chem., 262, 2345-2351), c-fos, TNF-alpha, C-reactive protein (Arcone, et al., (1988) Nucl. Acids Res., 16(8), 3195-3207), haptoglobin (Oliviero et al., (1987) EMBO J., 6, 1905-1912), serum amyloid A2, C/EBP alpha, IL-1, IL-6 (Poli and Cortese, (1989) Proc. Nat'l Acad. Sci. USA, 86, 8202-8206), Complement C3 (Wilson et al., (1990) Mol. Cell. Biol., 6181-6191), IL-8, alpha-1 acid glycoprotein (Prowse and Baumann, (1988) Mol Cell Biol, 8, 42-51), alpha-1 antitrypsin, lipoprotein lipase (Zechner et al., Mol. Cell. Biol., 2394-2401, 1988), angiotensinogen (Ron, et al., (1991) Mol. Cell. Biol., 2887-2895), fibrinogen, c-jun (inducible by phorbol esters, TNF-alpha, UV radiation, retinoic acid, and hydrogen peroxide), collagenase (induced by phorbol esters and retinoic acid), metallothionein (heavy metal and glucocorticoid inducible), Stromelysin (inducible by phorbol ester, interleukin-1 and EGF), alpha-2 macroglobulin and alpha-1 anti-chymotrypsin. Other promoters include, for example, SV40, MMTV, Human Immunodeficiency Virus (MV), Moloney virus, ALV, Epstein Barr virus, Rous Sarcoma virus, human actin, myosin, hemoglobin, and creatine.

[0332] It is envisioned that any of the above promoters alone or in combination with another can be useful depending on the action desired. Promoters, and other regulatory elements, are selected such that they are functional in the desired cells or tissue. In addition, this list of promoters should not be construed to be exhaustive or limiting; other promoters that are used in conjunction with the promoters and methods disclosed herein.

### Enhancers

[0333] Enhancers are genetic elements that increase transcription from a promoter located at a distant position on the same molecule of DNA. Early examples include the enhancers associated with immunoglobulin and T cell receptors that both flank the coding sequence and occur within several introns. Many viral promoters, such as CMV, SV40, and retroviral LTRs are closely associated with enhancer activity and are often treated like single elements. Enhancers are organized much like promoters. That is, they are composed of many individual elements, each of which binds to one or more transcriptional proteins. The basic distinction between enhancers and promoters is operational. An enhancer region as a whole stimulates transcription at a distance and often independent of orientation; this need not be true of a promoter region or its component elements. On the other hand, a promoter has one or more elements that direct initiation of RNA synthesis at a particular site and in a particular orientation, whereas enhancers lack these specificities. Promoters and enhancers are often overlapping and contiguous, often seeming to have a very similar modular organization. A subset of enhancers is locus-control regions (LCRs) that can not only increase transcriptional activity, but (along with insulator elements) can also help to insulate the transcriptional element from adjacent sequences when integrated into the genome. Any promoter/enhancer combination (as per the Eukaryotic Promoter Data Base EPDB) can be used to drive expression of the gene, although many will restrict expression to a particular tissue type or subset of tissues (reviewed in, for example, Kutzler, M. A., and Weiner, D. B., 2008. Nature Reviews Genetics 9:776-88). Examples include, but are not limited to, enhancers from the human actin, myosin, hemoglobin, muscle creatine kinase, sequences, and from viruses CMV, RSV, and EBV. Appropriate enhancers may be selected for particular applications. Eukaryotic cells can support cytoplasmic transcription from certain bacterial promoters if the appropriate bacterial polymerase is provided, either as part of the delivery complex or as an additional genetic expression construct.

### Polyadenylation Signals

[0334] Where a cDNA insert is employed, one will typically desire to include a polyadenylation signal to effect proper polyadenylation of the gene transcript. The nature of the polyadenylation signal is not believed to be crucial to the successful practice of the present methods, and any such sequence is employed such as human or bovine growth hormone and SV40 polyadenylation signals and LTR polyadenylation signals. One non-limiting example is the SV40 polyadenylation signal present in the pCEP3 plasmid (Invitrogen, Carlsbad, Calif.). Also, contemplated as an element of the expression cassette is a terminator. These elements can serve to enhance message levels and to minimize read through from the cassette into other sequences. Termination or poly(A) signal sequences may be, for example, positioned about 11-30 nucleotides downstream from a conserved sequence (AAUAAA) at the 3′ end of the mRNA (Montgomery, D. L., et al., 1993. DNA Cell Biol. 12:777-83; Kutzler, M. A., and Weiner, D. B., 2008. Nature Rev. Gen. 9:776-88).

[0335] 4. Initiation Signals and Internal Ribosome Binding Sites

[0336] A specific initiation signal also may be required for efficient translation of coding sequences. These signals include the ATG initiation codon or adjacent sequences. Exogenous translational control signals, including the ATG initiation codon, may need to be provided. The initiation codon is placed in-frame with the reading frame of the desired coding sequence to ensure translation of the entire insert. The exogenous translational control signals and initiation codons can be either natural or synthetic. The efficiency of expression may be enhanced by the inclusion of appropriate transcription enhancer elements.

[0337] In certain embodiments, the use of internal ribosome entry sites (IRES) elements is used to create multigene, or polycistronic messages. IRES elements are able to bypass the ribosome-scanning model of 5′ methylated cap-dependent translation and begin translation at internal sites (Pelletier and Sonenberg, Nature, 334:320-325, 1988). IRES elements from two members of the picornavirus family (polio and encephalomyocarditis) have been discussed (Pelletier and Sonenberg, 1988), as well an IRES from a mammalian message (Macejak and Sarnow, Nature, 353:90-94, 1991). IRES elements can be linked to heterologous open reading frames. Multiple open reading frames can be transcribed together, each separated by an IRES, creating polycistronic messages. By virtue of the IRES element, each open reading frame is accessible to ribosomes for efficient translation. Multiple genes can be efficiently expressed using a single promoter/enhancer to transcribe a single message (see U.S. Pat. Nos. 5,925,565 and 5,935,819, each herein incorporated by reference).

### Sequence Optimization

[0338] Protein production may also be increased by optimizing the codons in the transgene. Species specific codon changes may be used to increase protein production. Also, codons may be optimized to produce an optimized RNA, which may result in more efficient translation. By optimizing the codons to be incorporated in the RNA, elements such as those that result in a secondary structure that causes instability, secondary mRNA structures that can, for example, inhibit ribosomal binding, or cryptic sequences that can inhibit nuclear export of mRNA can be removed (Kutzler, M. A., and Weiner, D. B., 2008. Nature Rev. Gen. 9:776-88; Yan, J. et al., 2007. Mol. Ther. 15:411-21; Cheung, Y. K., et al., 2004. Vaccine 23:629-38; Narum, D. L., et al., 2001. 69:7250-55; Yadava, A., and Ockenhouse, C. F., 2003. Infect. Immun. 71:4962-69; Smith, J. M., et al., 2004. AIDS Res. Hum. Retroviruses 20:1335-47; Zhou, W., et al., 2002. Vet. Microbiol. 88:127-51; Wu, X., et al., 2004. Biochem. Biophys. Res. Commun. 313:89-96; Zhang, W., et al., 2006. Biochem. Biophys. Res. Commun. 349:69-78; Deml, L. A., et al., 2001. J. Virol. 75:1099-11001; Schneider, R. M., et al., 1997. J. Virol. 71:4892-4903; Wang, S. D., et al., 2006. Vaccine 24:4531-40; zur Megede, J., et al., 2000. J. Virol. 74:2628-2635). For example, the FBP12, the Caspase polypeptide, and the CD19 sequences may be optimized by changes in the codons.

### Leader Sequences

[0339] Leader sequences may be added to enhance the stability of mRNA and result in more efficient translation. The leader sequence is usually involved in targeting the mRNA to the endoplasmic reticulum. Examples include the signal sequence for the HIV-1 envelope glycoprotein (Env), which delays its own cleavage, and the IgE gene leader sequence (Kutzler, M. A., and Weiner, D. B., 2008. Nature Rev. Gen. 9:776-88; Li, V., et al., 2000. Virology 272:417-28; Xu, Z. L., et al. 2001. Gene 272:149-56; Malin, A. S., et al., 2000. Microbes Infect. 2:1677-85; Kutzler, M. A., et al., 2005. J. Immunol. 175:112-125; Yang, J. S., et al., 2002. Emerg. Infect. Dis. 8:1379-84; Kumar, S., et al., 2006. DNA Cell Biol. 25:383-92; Wang, S., et al., 2006. Vaccine 24:4531-40). The IgE leader may be used to enhance insertion into the endoplasmic reticulum (Tepler, I, et al. (1989) J. Biol. Chem. 264:5912).

[0340] Expression of the transgenes may be optimized and/or controlled by the selection of appropriate methods for optimizing expression. These methods include, for example, optimizing promoters, delivery methods, and gene sequences, (for example, as presented in Laddy, D. J., et al., 2008. PLoS. ONE 3 e2517; Kutzler, M. A., and Weiner, D. B., 2008. Nature Rev. Gen. 9:776-88).

### Nucleic Acids

[0341] A “nucleic acid” as used herein generally refers to a molecule (one, two or more strands) of DNA, RNA or a derivative or analog thereof, comprising a nucleobase. A nucleobase includes, for example, a naturally occurring purine or pyrimidine base found in DNA (e.g., an adenine “A,” a guanine “G,” a thymine “T” or a cytosine “C”) or RNA (e.g., an A, a G, an uracil “U” or a C). The term “nucleic acid” encompasses the terms “oligonucleotide” and “polynucleotide,” each as a subgenus of the term “nucleic acid.” Nucleic acids may be, be at least, be at most, or be about 3, 4, 5, 6, 7, 8, 9, 10, 11, 12, 13, 14, 15, 16, 17, 18, 19, 20, 21, 22, 23, 24, 25, 26, 27, 28, 29, 30, 31, 32, 33, 34, 35, 36, 37, 38, 39, 40, 41, 42, 43, 44, 45, 46, 47, 48, 49, 50, 51, 52, 53, 54, 55, 56, 57, 58, 59, 60, 61, 62, 63, 64, 65, 66, 67, 68, 69, 70, 71, 72, 73, 74, 75, 76, 77, 78, 79, 80, 81, 82, 83, 84, 85, 86, 87, 88, 89, 90, 91, 92, 93, 94, 95, 96, 97, 98, 99, 100, 101, 102, 103, 104, 105, 106, 107, 108, 109, 110, 120, 130, 140, 150, 160, 170, 180, 190, 200, 210, 220, 230, 240, 250, 260, 270, 280, 290, 300, 310, 320, 330, 340, 350, 360, 370, 380, 390, 400, 410, 420, 430, 440, 441, 450, 460, 470, 480, 490, 500, 510, 520, 530, 540, 550, 560, 570, 580, 590, 600, 610, 620, 630, 640, 650, 660, 670, 680, 690, 700, 710, 720, 730, 740, 750, 760, 770, 780, 790, 800, 810, 820, 830, 840, 850, 860, 870, 880, 890, 900, 910, 920, 930, 940, 950, 960, 970, 980, 990, or 1000 nucleotides, or any range derivable therein, in length.

[0342] Nucleic acids herein provided may have regions of identity or complementarity to another nucleic acid. It is contemplated that the region of complementarity or identity can be at least 5 contiguous residues, though it is specifically contemplated that the region is, is at least, is at most, or is about 6, 7, 8, 9, 10, 11, 12, 13, 14, 15, 16, 17, 18, 19, 20, 21, 22, 23, 24, 25, 26, 27, 28, 29, 30, 31, 32, 33, 34, 35, 36, 37, 38, 39, 40, 41, 42, 43, 44, 45, 46, 47, 48, 49, 50, 51, 52, 53, 54, 55, 56, 57, 58, 59, 60, 61, 62, 63, 64, 65, 66, 67, 68, 69, 70, 71, 72, 73, 74, 75, 76, 77, 78, 79, 80, 81, 82, 83, 84, 85, 86, 87, 88, 89, 90, 91, 92, 93, 94, 95, 96, 97, 98, 99, 100, 110, 120, 130, 140, 150, 160, 170, 180, 190, 200, 210, 220, 230, 240, 250, 260, 270, 280, 290, 300, 310, 320, 330, 340, 350, 360, 370, 380, 390, 400, 410, 420, 430, 440, 441, 450, 460, 470, 480, 490, 500, 510, 520, 530, 540, 550, 560, 570, 580, 590, 600, 610, 620, 630, 640, 650, 660, 670, 680, 690, 700, 710, 720, 730, 740, 750, 760, 770, 780, 790, 800, 810, 820, 830, 840, 850, 860, 870, 880, 890, 900, 910, 920, 930, 940, 950, 960, 970, 980, 990, or 1000 contiguous nucleotides.

[0343] As used herein, “hybridization”, “hybridizes” or “capable of hybridizing” is understood to mean forming a double or triple stranded molecule or a molecule with partial double or triple stranded nature. The term “anneal” as used herein is synonymous with “hybridize.” The term “hybridization”, “hybridize(s)” or “capable of hybridizing” encompasses the terms “stringent condition(s)” or “high stringency” and the terms “low stringency” or “low stringency condition(s).”

[0344] As used herein “stringent condition(s)” or “high stringency” are those conditions that allow hybridization between or within one or more nucleic acid strand(s) containing complementary sequence(s), but preclude hybridization of random sequences. Stringent conditions tolerate little, if any, mismatch between a nucleic acid and a target strand. Such conditions are known, and are often used for applications requiring high selectivity. Non-limiting applications include isolating a nucleic acid, such as a gene or a nucleic acid segment thereof, or detecting at least one specific mRNA transcript or a nucleic acid segment thereof, and the like.

[0345] Stringent conditions may comprise low salt and/or high temperature conditions, such as provided by about 0.02 M to about 0.5 M NaCl at temperatures of about 42 degrees C. to about 70 degrees C. It is understood that the temperature and ionic strength of a desired stringency are determined in part by the length of the particular nucleic acid(s), the length and nucleobase content of the target sequence(s), the charge composition of the nucleic acid(s), and the presence or concentration of formamide, tetramethylammonium chloride or other solvent(s) in a hybridization mixture.

[0346] It is understood that these ranges, compositions and conditions for hybridization are mentioned by way of non-limiting examples only, and that the desired stringency for a particular hybridization reaction is often determined empirically by comparison to one or more positive or negative controls. Depending on the application envisioned varying conditions of hybridization may be employed to achieve varying degrees of selectivity of a nucleic acid towards a target sequence. In a non-limiting example, identification or isolation of a related target nucleic acid that does not hybridize to a nucleic acid under stringent conditions may be achieved by hybridization at low temperature and/or high ionic strength. Such conditions are termed “low stringency” or “low stringency conditions,” and non-limiting examples of low stringency include hybridization performed at about 0.15 M to about 0.9 M NaCl at a temperature range of about 20 degrees C. to about 50 degrees C. The low or high stringency conditions may be further modified to suit a particular application.

### Nucleic Acid Modification

[0347] Any of the modifications discussed below may be applied to a nucleic acid. Examples of modifications include alterations to the RNA or DNA backbone, sugar or base, and various combinations thereof. Any suitable number of backbone linkages, sugars and/or bases in a nucleic acid can be modified (e.g., independently about 5%, 10%, 15%, 20%, 25%, 30%, 35%, 40%, 45%, 50%, 55%, 60%, 65%, 70%, 75%, 80%, 85%, 90%, 95%, up to 100%). An unmodified nucleoside is any one of the bases adenine, cytosine, guanine, thymine, or uracil joined to the 1′ carbon of beta-D-ribo-furanose.

[0348] A modified base is a nucleotide base other than adenine, guanine, cytosine and uracil at a 1′ position. Non-limiting examples of modified bases include inosine, purine, pyridin-4-one, pyridin-2-one, phenyl, pseudouracil, 2, 4, 6-trimethoxy benzene, 3-methyl uracil, dihydrouridine, naphthyl, aminophenyl, 5-alkylcytidines (e.g., 5-methylcytidine), 5-alkyluridines (e. g., ribothymidine), 5-halouridine (e. g., 5-bromouridine) or 6-azapyrimidines or 6-alkylpyrimidines (e. g. 6-methyluridine), propyne, and the like. Other non-limiting examples of modified bases include nitropyrrolyl (e.g., 3-nitropyrrolyl), nitroindolyl (e.g., 4-, 5-, 6-nitroindolyl), hypoxanthinyl, isoinosinyl, 2-aza-inosinyl, 7-deaza-inosinyl, nitroimidazolyl, nitropyrazolyl, nitrobenzimidazolyl, nitroindazolyl, aminoindolyl, pyrrolopyrimidinyl, difluorotolyl, 4-fluoro-6-methylbenzimidazole, 4-methylbenzimidazole, 3-methyl isocarbostyrilyl, 5-methyl isocarbostyrilyl, 3-methyl-7-propynyl isocarbostyrilyl, 7-azaindolyl, 6-methyl-7-azaindolyl, imidizopyridinyl, 9-methyl-imidizopyridinyl, pyrrolopyrizinyl, isocarbostyrilyl, 7-propynyl isocarbostyrilyl, propynyl-7-azaindolyl, 2,4,5-trimethylphenyl, 4-methylindolyl, 4,6-dimethylindolyl, phenyl, napthalenyl, anthracenyl, phenanthracenyl, pyrenyl, stilbenyl, tetracenyl, pentacenyl and the like.

[0349] In some embodiments, for example, a nucleic acid may comprise modified nucleic acid molecules, with phosphate backbone modifications. Non-limiting examples of backbone modifications include phosphorothioate, phosphorodithioate, methylphosphonate, phosphotriester, morpholino, amidate carbamate, carboxymethyl, acetamidate, polyamide, sulfonate, sulfonamide, sulfamate, formacetal, thioformacetal, and/or alkylsilyl modifications. In certain instances, a ribose sugar moiety that naturally occurs in a nucleoside is replaced with a hexose sugar, polycyclic heteroalkyl ring, or cyclohexenyl group. In certain instances, the hexose sugar is an allose, altrose, glucose, mannose, gulose, idose, galactose, talose, or a derivative thereof. The hexose may be a D-hexose, glucose, or mannose. In certain instances, the polycyclic heteroalkyl group may be a bicyclic ring containing one oxygen atom in the ring. In certain instances, the polycyclic heteroalkyl group is a bicyclo[2.2.1]heptane, a bicyclo[3.2.1]octane, or a bicyclo[3.3.1]nonane.

[0350] Nitropyrrolyl and nitroindolyl nucleobases are members of a class of compounds known as universal bases. Universal bases are those compounds that can replace any of the four naturally occurring bases without substantially affecting the melting behavior or activity of the oligonucleotide duplex. In contrast to the stabilizing, hydrogen-bonding interactions associated with naturally occurring nucleobases, oligonucleotide duplexes containing 3-nitropyrrolyl nucleobases may be stabilized solely by stacking interactions. The absence of significant hydrogen-bonding interactions with nitropyrrolyl nucleobases obviates the specificity for a specific complementary base. In addition, 4-, 5- and 6-nitroindolyl display very little specificity for the four natural bases. Procedures for the preparation of 1-(2′-O-methykbeta.-D-ribofuranosyl)-5-nitroindole are discussed in Gaubert, G.; Wengel, J. Tetrahedron Letters 2004, 45, 5629. Other universal bases include hypoxanthinyl, isoinosinyl, 2-aza-inosinyl, 7-deaza-inosinyl, nitroimidazolyl, nitropyrazolyl, nitrobenzimidazolyl, nitroindazolyl, aminoindolyl, pyrrolopyrimidinyl, and structural derivatives thereof.

[0351] Difluorotolyl is a non-natural nucleobase that functions as a universal base. Difluorotolyl is an isostere of the natural nucleobase thymine. But unlike thymine, difluorotolyl shows no appreciable selectivity for any of the natural bases. Other aromatic compounds that function as universal bases are 4-fluoro-6-methylbenzimidazole and 4-methylbenzimidazole. In addition, the relatively hydrophobic isocarbostyrilyl derivatives 3-methyl isocarbostyrilyl, 5-methyl isocarbostyrilyl, and 3-methyl-7-propynyl isocarbostyrilyl are universal bases which cause only slight destabilization of oligonucleotide duplexes compared to the oligonucleotide sequence containing only natural bases. Other non-natural nucleobases include 7-azaindolyl, 6-methyl-7-azaindolyl, imidizopyridinyl, 9-methyl-imidizopyridinyl, pyrrolopyrizinyl, isocarbostyrilyl, 7-propynyl isocarbostyrilyl, propynyl-7-azaindolyl, 2,4,5-trimethylphenyl, 4-methylindolyl, 4,6-dimethylindolyl, phenyl, napthalenyl, anthracenyl, phenanthracenyl, pyrenyl, stilbenyl, tetracenyl, pentacenyl, and structural derivates thereof. For a more detailed discussion, including synthetic procedures, of difluorotolyl, 4-fluoro-6-methylbenzimidazole, 4-methylbenzimidazole, and other non-natural bases mentioned above, see: Schweitzer et al., J. Org. Chem., 59:7238-7242 (1994);

[0352] In addition, chemical substituents, for example cross-linking agents, may be used to add further stability or irreversibility to the reaction. Non-limiting examples of cross-linking agents include, for example, 1,1-bis(diazoacetyl)-2-phenylethane, glutaraldehyde, N-hydroxysuccinimide esters, for example, esters with 4-azidosalicylic acid, homobifunctional imidoesters, including disuccinimidyl esters such as 3,3′-dithiobis(succinimidylpropionate), bifunctional maleimides such as bis-N-maleimido-1,8-octane and agents such as methyl-3-[(p-azidophenyl) dithio]propioimidate.

[0353] A nucleotide analog may also include a “locked” nucleic acid. Certain compositions can be used to essentially “anchor” or “lock” an endogenous nucleic acid into a particular structure. Anchoring sequences serve to prevent disassociation of a nucleic acid complex, and thus not only can prevent copying but may also enable labeling, modification, and/or cloning of the endogeneous sequence. The locked structure may regulate gene expression (i.e. inhibit or enhance transcription or replication), or can be used as a stable structure that can be used to label or otherwise modify the endogenous nucleic acid sequence, or can be used to isolate the endogenous sequence, i.e. for cloning.

[0354] Nucleic acid molecules need not be limited to those molecules containing only RNA or DNA, but further encompass chemically-modified nucleotides and non-nucleotides. The percent of non-nucleotides or modified nucleotides may be from 1% to 100% (e.g., about 5, 10, 15, 20, 25, 30, 35, 40, 45, 50, 55, 60, 65, 70, 75, 80, 85, 90 or 95%).

### Nucleic Acid Preparation

[0355] In some embodiments, a nucleic acid is provided for use as a control or standard in an assay, or therapeutic, for example. A nucleic acid may be made by any technique known in the art, such as for example, chemical synthesis, enzymatic production or biological production. Nucleic acids may be recovered or isolated from a biological sample. The nucleic acid may be recombinant or it may be natural or endogenous to the cell (produced from the cell's genome). It is contemplated that a biological sample may be treated in a way so as to enhance the recovery of small nucleic acid molecules. Generally, methods may involve lysing cells with a solution having guanidinium and a detergent.

[0356] Nucleic acid synthesis may also be performed according to standard methods. Non-limiting examples of a synthetic nucleic acid (e.g., a synthetic oligonucleotide), include a nucleic acid made by in vitro chemical synthesis using phosphotriester, phosphite, or phosphoramidite chemistry and solid phase techniques or via deoxynucleoside H-phosphonate intermediates. Various different mechanisms of oligonucleotide synthesis have been disclosed elsewhere.

[0357] Nucleic acids may be isolated using known techniques. In particular embodiments, methods for isolating small nucleic acid molecules, and/or isolating RNA molecules can be employed. Chromatography is a process used to separate or isolate nucleic acids from protein or from other nucleic acids. Such methods can involve electrophoresis with a gel matrix, filter columns, alcohol precipitation, and/or other chromatography. If a nucleic acid from cells is to be used or evaluated, methods generally involve lysing the cells with a chaotropic (e.g., guanidinium isothiocyanate) and/or detergent (e.g., N-lauroyl sarcosine) prior to implementing processes for isolating particular populations of RNA.

[0358] Methods may involve the use of organic solvents and/or alcohol to isolate nucleic acids. In some embodiments, the amount of alcohol added to a cell lysate achieves an alcohol concentration of about 55% to 60%. While different alcohols can be employed, ethanol works well. A solid support may be any structure, and it includes beads, filters, and columns, which may include a mineral or polymer support with electronegative groups. A glass fiber filter or column is effective for such isolation procedures.

[0359] A nucleic acid isolation processes may sometimes include: a) lysing cells in the sample with a lysing solution comprising guanidinium, where a lysate with a concentration of at least about 1 M guanidinium is produced; b) extracting nucleic acid molecules from the lysate with an extraction solution comprising phenol; c) adding to the lysate an alcohol solution to form a lysate/alcohol mixture, wherein the concentration of alcohol in the mixture is between about 35% to about 70%; d) applying the lysate/alcohol mixture to a solid support; e) eluting the nucleic acid molecules from the solid support with an ionic solution; and, f) capturing the nucleic acid molecules. The sample may be dried down and resuspended in a liquid and volume appropriate for subsequent manipulation.

[0360] Provided herein are compositions or kits that comprise nucleic acid comprising the polynucleotides of the present application. Thus, compositions or kits may, for example, comprise both the first and second polynucleotides, encoding the first and second chimeric polypeptides. The nucleic acid may comprise more than one nucleic acid species, that is, for example, the first nucleic acid species comprises the first polynucleotide, and the second nucleic acid species comprises the second polynucleotide. In other examples, the nucleic acid may comprise both the first and second polynucleotides. The kit may, in addition, comprise the first or second ligand, or both. The kits may, in some embodiments, provide a nucleic acid composition, such as, for example, a virus, for example, a retrovirus, that comprises at least two polynucleotides, wherein the polynucleotides express, for example, an inducible pro-apoptotic polypeptide and a chimeric antigen receptor; an inducible pro-apoptotic polypeptide and a recombinant TCR; an inducible pro-apoptotic polypeptide and a chimeric costimulating polypeptide such as, for example an inducible chimeric MyD88 polypeptide, an inducible chimeric truncated MyD88 polypeptide, and optionally a CD40 polypeptide. The nucleic acid composition may comprise polynucleotides encoding an inducible pro-apoptotic polypeptide, an inducible chimeric MyD88 polypeptide or an inducible chimeric truncated MyD88 polypeptide, and optionally a CD40 polypeptide, and a chimeric antigen receptor or a recombinant T cell receptor.

[0361] Thus, in certain embodiments, kits are provided that comprise a nucleic acid composition such as, for example a virus, for example, a retrovirus, that comprises a polynucleotide that encodes 1) an iRC9 or iRmC9 polypeptide and an iM (MyD88FvFv) or iMC polypeptide; 2) an RC9 or iRmC9 polypeptide and a chimeric antigen receptor; 3) an iRC9 or iRmC9 polypeptide and a recombinant TCR; 4) an iC9 polypeptide and an iRMC or iRM (iRMyD88) polypeptide; 5) an iC9 polypeptide and an iRMC or iRM (iRMyD88) polypeptide and a chimeric antigen receptor; or 6) an iC9 polypeptide and an iRMC or iRM (iRMyD88) polypeptide and a recombinant T cell receptor.

### Methods of Gene Transfer

[0362] In order to mediate the effect of the transgene expression in a cell, it will be necessary to transfer the expression constructs into a cell. Such transfer may employ viral or non-viral methods of gene transfer. This section provides a discussion of methods and compositions of gene transfer. A transformed cell comprising an expression vector is generated by introducing into the cell the expression vector. Suitable methods for polynucleotide delivery for transformation of an organelle, a cell, a tissue or an organism for use with the current methods include virtually any method by which a polynucleotide (e.g., DNA) can be introduced into an organelle, a cell, a tissue or an organism.

[0363] A host cell can, and has been, used as a recipient for vectors. Host cells may be derived from prokaryotes or eukaryotes, depending upon whether the desired result is replication of the vector or expression of part or all of the vector-encoded polynucleotide sequences. Numerous cell lines and cultures are available for use as a host cell, and they can be obtained through the American Type Culture Collection (ATCC), which is an organization that serves as an archive for living cultures and genetic materials.

[0364] An appropriate host may be determined. Generally, this is based on the vector backbone and the desired result. A plasmid or cosmid, for example, can be introduced into a prokaryote host cell for replication of many vectors. Bacterial cells used as host cells for vector replication and/or expression include DH5alpha, JM109, and KCB, as well as a number of commercially available bacterial hosts such as SURE® Competent Cells and SOLOPACK Gold Cells (STRATAGENE®, La Jolla, Calif.). Alternatively, bacterial cells such as E. coli LE392 could be used as host cells for phage viruses. Eukaryotic cells that can be used as host cells include, but are not limited to yeast, insects and mammals. Examples of mammalian eukaryotic host cells for replication and/or expression of a vector include, but are not limited to, HeLa, NIH3T3, Jurkat, 293, COS, CHO, Saos, and PC12. Examples of yeast strains include, but are not limited to, YPH499, YPH500 and YPH501.

[0365] Nucleic acid vaccines may include, for example, non-viral DNA vectors, “naked” DNA and RNA, and viral vectors. Methods of transforming cells with these vaccines, and for optimizing the expression of genes included in these vaccines are known and are also discussed herein.

[0366] Examples of Methods of Nucleic Acid or Viral Vector Transfer

[0367] Any appropriate method may be used to transfect or transform the cells, or to administer the nucleotide sequences or compositions of the present methods. Certain examples are presented herein, and further include methods such as delivery using cationic polymers, lipid like molecules, and certain commercial products such as, for example, IN-VIVO-JET PEI.

### Ex Vivo Transformation

[0368] Various methods are available for transfecting vascular cells and tissues removed from an organism in an ex vivo setting. For example, canine endothelial cells have been genetically altered by retroviral gene transfer in vitro and transplanted into a canine (Wilson et al., Science, 244:1344-1346, 1989). In another example, Yucatan minipig endothelial cells were transfected by retrovirus in vitro and transplanted into an artery using a double-balloon catheter (Nabel et al., Science, 244(4910):1342-1344, 1989). Thus, it is contemplated that cells or tissues may be removed and transfected ex vivo using the polynucleotides presented herein. In particular aspects, the transplanted cells or tissues may be placed into an organism.

### Injection

[0369] In certain embodiments, an antigen presenting cell or a nucleic acid or viral vector may be delivered to an organelle, a cell, a tissue or an organism via one or more injections (i.e., a needle injection), such as, for example, subcutaneous, intradermal, intramuscular, intravenous, intraprotatic, intratumor, intraperitoneal, etc. Methods of injection include, for example, injection of a composition comprising a saline solution. Further embodiments include the introduction of a polynucleotide by direct microinjection. The amount of the expression vector used may vary upon the nature of the antigen as well as the organelle, cell, tissue or organism used. Intradermal, intranodal, or intralymphatic injections are some of the more commonly used methods of DC administration. Intradermal injection is characterized by a low rate of absorption into the bloodstream but rapid uptake into the lymphatic system. The presence of large numbers of Langerhans dendritic cells in the dermis will transport intact as well as processed antigen to draining lymph nodes. Proper site preparation is necessary to perform this correctly (i.e., hair is clipped in order to observe proper needle placement). Intranodal injection allows for direct delivery of antigen to lymphoid tissues. Intralymphatic injection allows direct administration of DCs.

### Electroporation

[0370] In certain embodiments, a polynucleotide is introduced into an organelle, a cell, a tissue or an organism via electroporation. Electroporation involves the exposure of a suspension of cells and DNA to a high-voltage electric discharge. In some variants of this method, certain cell wall-degrading enzymes, such as pectin-degrading enzymes, are employed to render the target recipient cells more susceptible to transformation by electroporation than untreated cells (U.S. Pat. No. 5,384,253, incorporated herein by reference).

[0371] Transfection of eukaryotic cells using electroporation has been quite successful. Mouse pre-B lymphocytes have been transfected with human kappa-immunoglobulin genes (Potter et al., (1984) Proc. Nat'l Acad. Sci. USA, 81, 7161-7165), and rat hepatocytes have been transfected with the chloramphenicol acetyltransferase gene (Tur-Kaspa et al., (1986) Mol. Cell Biol., 6, 716-718) in this manner.

[0372] In vivo electroporation for vaccines, or eVac, is clinically implemented through a simple injection technique. A DNA vector encoding a polypeptide is injected intradermally in a patient. Then electrodes apply electrical pulses to the intradermal space causing the cells localized there, especially resident dermal dendritic cells, to take up the DNA vector and express the encoded polypeptide. These polypeptide-expressing cells activated by local inflammation can then migrate to lymph-nodes, presenting antigens, for example. A nucleic acid is electroporetically administered when it is administered using electroporation, following, for example, but not limited to, injection of the nucleic acid or any other means of administration where the nucleic acid may be delivered to the cells by electroporation

[0373] Methods of electroporation are discussed in, for example, Sardesai, N. Y., and Weiner, D. B., Current Opinion in Immunotherapy 23:421-9 (2011) and Ferraro, B. et al., Human Vaccines 7:120-127 (2011), which are hereby incorporated by reference herein in their entirety.

### Calcium Phosphate

[0374] In other embodiments, a polynucleotide is introduced to the cells using calcium phosphate precipitation. Human KB cells have been transfected with adenovirus 5 DNA (Graham and van der Eb, (1973) Virology, 52, 456-467) using this technique. Also in this manner, mouse L(A9), mouse C127, CHO, CV-1, BHK, NIH3T3 and HeLa cells were transfected with a neomycin marker gene (Chen and Okayama, Mol. Cell Biol., 7(8):2745-2752, 1987), and rat hepatocytes were transfected with a variety of marker genes (Rippe et al., Mol. Cell Biol., 10:689-695, 1990).

### DEAE-Dextran

[0375] In another embodiment, a polynucleotide is delivered into a cell using DEAE-dextran followed by polyethylene glycol. In this manner, reporter plasmids were introduced into mouse myeloma and erythroleukemia cells (Gopal, T. V., Mol Cell Biol. 1985 May; 5(5):1188-90).

### Sonication Loading

[0376] Additional embodiments include the introduction of a polynucleotide by direct sonic loading. LTK-fibroblasts have been transfected with the thymidine kinase gene by sonication loading (Fechheimer et al., (1987) Proc. Nat'l Acad. Sci. USA, 84, 8463-8467).

### Liposome-Mediated Transfection

[0377] In a further embodiment, a polynucleotide may be entrapped in a lipid complex such as, for example, a liposome. Liposomes are vesicular structures characterized by a phospholipid bilayer membrane and an inner aqueous medium. Multilamellar liposomes have multiple lipid layers separated by aqueous medium. They form spontaneously when phospholipids are suspended in an excess of aqueous solution. The lipid components undergo self-rearrangement before the formation of closed structures and entrap water and dissolved solutes between the lipid bilayers (Ghosh and Bachhawat, (1991) In: Liver Diseases, Targeted Diagnosis and Therapy Using Specific Receptors and Ligands. pp. 87-104). Also contemplated is a polynucleotide complexed with Lipofectamine (Gibco BRL) or Superfect (Qiagen).

### Receptor Mediated Transfection

[0378] Still further, a polynucleotide may be delivered to a target cell via receptor-mediated delivery vehicles. These take advantage of the selective uptake of macromolecules by receptor-mediated endocytosis that will be occurring in a target cell. In view of the cell type-specific distribution of various receptors, this delivery method adds another degree of specificity.

[0379] Certain receptor-mediated gene targeting vehicles comprise a cell receptor-specific ligand and a polynucleotide-binding agent. Others comprise a cell receptor-specific ligand to which the polynucleotide to be delivered has been operatively attached. Several ligands have been used for receptor-mediated gene transfer (Wu and Wu, (1987) J. Biol. Chem., 262, 4429-4432; Wagner et al., Proc. Natl. Acad. Sci. USA, 87(9):3410-3414, 1990; Perales et al., Proc. Natl. Acad. Sci. USA, 91:4086-4090, 1994; Myers, EPO 0273085), which establishes the operability of the technique. Specific delivery in the context of another mammalian cell type has been discussed (Wu and Wu, Adv. Drug Delivery Rev., 12:159-167, 1993; incorporated herein by reference). In certain aspects, a ligand is chosen to correspond to a receptor specifically expressed on the target cell population. In other embodiments, a polynucleotide delivery vehicle component of a cell-specific polynucleotide-targeting vehicle may comprise a specific binding ligand in combination with a liposome. The polynucleotide(s) to be delivered are housed within the liposome and the specific binding ligand is functionally incorporated into the liposome membrane. The liposome will thus specifically bind to the receptor(s) of a target cell and deliver the contents to a cell. Such systems have been shown to be functional using systems in which, for example, epidermal growth factor (EGF) is used in the receptor-mediated delivery of a polynucleotide to cells that exhibit upregulation of the EGF receptor.

[0380] In still further embodiments, the polynucleotide delivery vehicle component of a targeted delivery vehicle may be a liposome itself, which may, for example, comprise one or more lipids or glycoproteins that direct cell-specific binding. For example, lactosyl-ceramide, a galactose-terminal asialoganglioside, have been incorporated into liposomes and observed an increase in the uptake of the insulin gene by hepatocytes (Nicolau et al., (1987) Methods Enzymol., 149, 157-176). It is contemplated that the tissue-specific transforming constructs may be specifically delivered into a target cell in a similar manner.

### Microprojectile Bombardment

[0381] Microprojectile bombardment techniques can be used to introduce a polynucleotide into at least one, organelle, cell, tissue or organism (U.S. Pat. No. 5,550,318; U.S. Pat. No. 5,538,880; U.S. Pat. No. 5,610,042; and PCT Application WO 94/09699; each of which is incorporated herein by reference). This method depends on the ability to accelerate DNA-coated microprojectiles to a high velocity allowing them to pierce cell membranes and enter cells without killing them (Klein et al., (1987) Nature, 327, 70-73). There are a wide variety of microprojectile bombardment techniques known in the art, many of which are applicable to the present methods. In this microprojectile bombardment, one or more particles may be coated with at least one polynucleotide and delivered into cells by a propelling force. Several devices for accelerating small particles have been developed. One such device relies on a high voltage discharge to generate an electrical current, which in turn provides the motive force (Yang et al., (1990) Proc. Nat'l Acad. Sci. USA, 87, 9568-9572). The microprojectiles used have consisted of biologically inert substances such as tungsten or gold particles or beads. Exemplary particles include those comprised of tungsten, platinum, and, in certain examples, gold, including, for example, nanoparticles. It is contemplated that in some instances DNA precipitation onto metal particles would not be necessary for DNA delivery to a recipient cell using microprojectile bombardment. However, it is contemplated that particles may contain DNA rather than be coated with DNA. DNA-coated particles may increase the level of DNA delivery via particle bombardment but are not, in and of themselves, necessary.

### Examples of Methods of Viral Vector-Mediated Transfer

[0382] Any viral vector suitable for administering nucleotide sequences, or compositions comprising nucleotide sequences, to a cell or to a subject, such that the cell or cells in the subject may express the genes encoded by the nucleotide sequences may be employed in the present methods. In certain embodiments, a transgene is incorporated into a viral particle to mediate gene transfer to a cell. Typically, the virus simply will be exposed to the appropriate host cell under physiologic conditions, permitting uptake of the virus. The present methods are advantageously employed using a variety of viral vectors, as discussed below.

### Adenovirus

[0383] Adenovirus is particularly suitable for use as a gene transfer vector because of its mid-sized DNA genome, ease of manipulation, high titer, wide target-cell range, and high infectivity. The roughly 36 kb viral genome is bounded by 100-200 base pair (bp) inverted terminal repeats (ITR), in which are contained cis-acting elements necessary for viral DNA replication and packaging. The early (E) and late (L) regions of the genome that contain different transcription units are divided by the onset of viral DNA replication.

[0384] The E1 region (E1A and E1B) encodes proteins responsible for the regulation of transcription of the viral genome and a few cellular genes. The expression of the E2 region (E2A and E2B) results in the synthesis of the proteins for viral DNA replication. These proteins are involved in DNA replication, late gene expression, and host cell shut off (Renan, M. J. (1990) Radiother Oncol., 19, 197-218). The products of the late genes (L1, L2, L3, L4 and L5), including the majority of the viral capsid proteins, are expressed only after significant processing of a single primary transcript issued by the major late promoter (MLP). The MLP (located at 16.8 map units) is particularly efficient during the late phase of infection, and all the mRNAs issued from this promoter possess a 5′ tripartite leader (TL) sequence, which makes them useful for translation.

[0385] In order for adenovirus to be optimized for gene therapy, it is necessary to maximize the carrying capacity so that large segments of DNA can be included. It also is very desirable to reduce the toxicity and immunologic reaction associated with certain adenoviral products. The two goals are, to an extent, coterminous in that elimination of adenoviral genes serves both ends. By practice of the present methods, it is possible to achieve both these goals while retaining the ability to manipulate the therapeutic constructs with relative ease.

[0386] The large displacement of DNA is possible because the cis elements required for viral DNA replication all are localized in the inverted terminal repeats (ITR) (100-200 bp) at either end of the linear viral genome. Plasmids containing ITR's can replicate in the presence of a non-defective adenovirus (Hay, R. T., et al., J Mol Biol. 1984 Jun. 5; 175(4):493-510). Therefore, inclusion of these elements in an adenoviral vector may permits replication.

[0387] In addition, the packaging signal for viral encapsulation is localized between 194-385 bp (0.5-1.1 map units) at the left end of the viral genome (Hearing et al., J. (1987) Virol., 67, 2555-2558). This signal mimics the protein recognition site in bacteriophage lambda DNA where a specific sequence close to the left end, but outside the cohesive end sequence, mediates the binding to proteins that are required for insertion of the DNA into the head structure. E1 substitution vectors of Ad have demonstrated that a 450 bp (0-1.25 map units) fragment at the left end of the viral genome could direct packaging in 293 cells (Levrero et al., Gene, 101:195-202, 1991).

[0388] Previously, it has been shown that certain regions of the adenoviral genome can be incorporated into the genome of mammalian cells and the genes encoded thereby expressed. These cell lines are capable of supporting the replication of an adenoviral vector that is deficient in the adenoviral function encoded by the cell line. There also have been reports of complementation of replication deficient adenoviral vectors by “helping” vectors, e.g., wild-type virus or conditionally defective mutants.

[0389] Replication-deficient adenoviral vectors can be complemented, in trans, by helper virus. This observation alone does not permit isolation of the replication-deficient vectors, however, since the presence of helper virus, needed to provide replicative functions, would contaminate any preparation. Thus, an additional element was needed that would add specificity to the replication and/or packaging of the replication-deficient vector. That element derives from the packaging function of adenovirus.

[0390] It has been shown that a packaging signal for adenovirus exists in the left end of the conventional adenovirus map (Tibbetts et. al. (1977) Cell, 12, 243-249). Later studies showed that a mutant with a deletion in the E1A (194-358 bp) region of the genome grew poorly even in a cell line that complemented the early (E1A) function (Hearing and Shenk, (1983) J. Mol. Biol. 167, 809-822). When a compensating adenoviral DNA (0-353 bp) was recombined into the right end of the mutant, the virus was packaged normally. Further mutational analysis identified a short, repeated, position-dependent element in the left end of the Ad5 genome. One copy of the repeat was found to be sufficient for efficient packaging if present at either end of the genome, but not when moved toward the interior of the Ad5 DNA molecule (Hearing et al., J. (1987) Virol., 67, 2555-2558).

[0391] By using mutated versions of the packaging signal, it is possible to create helper viruses that are packaged with varying efficiencies. Typically, the mutations are point mutations or deletions. When helper viruses with low efficiency packaging are grown in helper cells, the virus is packaged, albeit at reduced rates compared to wild-type virus, thereby permitting propagation of the helper. When these helper viruses are grown in cells along with virus that contains wild-type packaging signals, however, the wild-type packaging signals are recognized preferentially over the mutated versions. Given a limiting amount of packaging factor, the virus containing the wild-type signals is packaged selectively when compared to the helpers. If the preference is great enough, stocks approaching homogeneity may be achieved.

[0392] To improve the tropism of ADV constructs for particular tissues or species, the receptor-binding fiber sequences can often be substituted between adenoviral isolates. For example the Coxsackie-adenovirus receptor (CAR) ligand found in adenovirus 5 can be substituted for the CD46-binding fiber sequence from adenovirus 35, making a virus with greatly improved binding affinity for human hematopoietic cells. The resulting “pseudotyped” virus, Ad5f35, has been the basis for several clinically developed viral isolates. Moreover, various biochemical methods exist to modify the fiber to allow re-targeting of the virus to target cells. Methods include use of bifunctional antibodies (with one end binding the CAR ligand and one end binding the target sequence), and metabolic biotinylation of the fiber to permit association with customized avidin-based chimeric ligands. Alternatively, one could attach ligands (e.g. anti-CD205 by heterobifunctional linkers (e.g. PEG-containing), to the adenovirus particle.

### Retrovirus

[0393] The retroviruses are a group of single-stranded RNA viruses characterized by an ability to convert their RNA to double-stranded DNA in infected cells by a process of reverse-transcription (Coffin, (1990) In: Virology, ed., New York: Raven Press, pp. 1437-1500). The resulting DNA then stably integrates into cellular chromosomes as a provirus and directs synthesis of viral proteins. The integration results in the retention of the viral gene sequences in the recipient cell and its descendants. The retroviral genome contains three genes—gag, pol and env—that code for capsid proteins, polymerase enzyme, and envelope components, respectively. A sequence found upstream from the gag gene, termed psi, functions as a signal for packaging of the genome into virions. Two long terminal repeat (LTR) sequences are present at the 5′ and 3′ ends of the viral genome. These contain strong promoter and enhancer sequences and also are required for integration in the host cell genome (Coffin, 1990). Thus, for example, the present technology includes, for example, cells whereby the polynucleotide used to transduce the cell is integrated into the genome of the cell.

[0394] In order to construct a retroviral vector, a nucleic acid encoding a promoter is inserted into the viral genome in the place of certain viral sequences to produce a virus that is replication-defective. In order to produce virions, a packaging cell line containing the gag, pol and env genes but without the LTR and psi components is constructed (Mann et al., (1983) Cell, 33, 153-159). When a recombinant plasmid containing a human cDNA, together with the retroviral LTR and psi sequences is introduced into this cell line (by calcium phosphate precipitation for example), the psi sequence allows the RNA transcript of the recombinant plasmid to be packaged into viral particles, which are then secreted into the culture media (Nicolas, J. F., and Rubenstein, J. L. R., (1988) In: Vectors: a Survey of Molecular Cloning Vectors and Their Uses, Rodriquez and Denhardt, Eds.). Nicolas and Rubenstein; Temin et al., (1986) In: Gene Transfer, Kucherlapati (ed.), and New York: Plenum Press, pp. 149-188; Mann et al., 1983). The media containing the recombinant retroviruses is collected, optionally concentrated, and used for gene transfer. Retroviral vectors are able to infect a broad variety of cell types. However, integration and stable expression of many types of retroviruses require the division of host cells (Paskind et al., (1975) Virology, 67, 242-248). An approach designed to allow specific targeting of retrovirus vectors recently was developed based on the chemical modification of a retrovirus by the chemical addition of galactose residues to the viral envelope. This modification could permit the specific infection of cells such as hepatocytes via asialoglycoprotein receptors, may be desired.

[0395] A different approach to targeting of recombinant retroviruses was designed, which used biotinylated antibodies against a retroviral envelope protein and against a specific cell receptor. The antibodies were coupled via the biotin components by using streptavidin (Roux et al., (1989) Proc. Nat'l Acad. Sci. USA, 86, 9079-9083). Using antibodies against major histocompatibility complex class I and class II antigens, the infection of a variety of human cells that bore those surface antigens was demonstrated with an ecotropic virus in vitro (Roux et al., 1989).

### Adeno-Associated Virus

[0396] AAV utilizes a linear, single-stranded DNA of about 4700 base pairs. Inverted terminal repeats flank the genome. Two genes are present within the genome, giving rise to a number of distinct gene products. The first, the cap gene, produces three different virion proteins (VP), designated VP-1, VP-2 and VP-3. The second, the rep gene, encodes four non-structural proteins (NS). One or more of these rep gene products is responsible for transactivating AAV transcription. The three promoters in AAV are designated by their location, in map units, in the genome. These are, from left to right, p5, p19 and p40. Transcription gives rise to six transcripts, two initiated at each of three promoters, with one of each pair being spliced. The splice site, derived from map units 42-46, is the same for each transcript. The four non-structural proteins apparently are derived from the longer of the transcripts, and three virion proteins all arise from the smallest transcript.

[0397] AAV is not associated with any pathologic state in humans. Interestingly, for efficient replication, AAV requires “helping” functions from viruses such as herpes simplex virus I and II, cytomegalovirus, pseudorabies virus and, of course, adenovirus. The best characterized of the helpers is adenovirus, and many “early” functions for this virus have been shown to assist with AAV replication. Low-level expression of AAV rep proteins believed to hold AAV structural expression in check, and helper virus infection is thought to remove this block.

[0398] The terminal repeats of the AAV vector can be obtained by restriction endonuclease digestion of AAV or a plasmid such as p201, which contains a modified AAV genome (Samulski et al., J. Virol., 61:3096-3101 (1987)), or by other methods, including but not limited to chemical or enzymatic synthesis of the terminal repeats based upon the published sequence of AAV. It can be determined, for example, by deletion analysis, the minimum sequence or part of the AAV ITRs which is required to allow function, i.e., stable and site-specific integration. It can also be determined which minor modifications of the sequence can be tolerated while maintaining the ability of the terminal repeats to direct stable, site-specific integration.

[0399] AAV-based vectors have proven to be safe and effective vehicles for gene delivery in vitro, and these vectors are being developed and tested in pre-clinical and clinical stages for a wide range of applications in potential gene therapy, both ex vivo and in vivo (Carter and Flotte, (1995) Ann. N.Y. Acad. Sci., 770; 79-90; Chatteijee, et al., (1995) Ann. N.Y. Acad. Sci., 770, 79-90; Ferrari et al., (1996) J. Virol., 70, 3227-3234; Fisher et al., (1996) J. Virol., 70, 520-532; Flotte et al., Proc. Nat'l Acad. Sci. USA, 90, 10613-10617, (1993); Goodman et al. (1994), Blood, 84, 1492-1500; Kaplitt et al., (1994) Nat'l Genet., 8, 148-153; Kaplitt, M. G., et al., Ann Thorac Surg. 1996 December; 62(6):1669-76; Kessler et al., (1996) Proc. Nat'l Acad. Sci. USA, 93, 14082-14087; Koeberl et al., (1997) Proc. Nat'l Acad. Sci. USA, 94, 1426-1431; Mizukami et al., (1996) Virology, 217, 124-130).

[0400] AAV-mediated efficient gene transfer and expression in the lung has led to clinical trials for the treatment of cystic fibrosis (Carter and Flotte, 1995; Flotte et al., Proc. Nat'l Acad. Sci. USA, 90, 10613-10617, (1993)). Similarly, the prospects for treatment of muscular dystrophy by AAV-mediated gene delivery of the dystrophin gene to skeletal muscle, of Parkinson's disease by tyrosine hydroxylase gene delivery to the brain, of hemophilia B by Factor IX gene delivery to the liver, and potentially of myocardial infarction by vascular endothelial growth factor gene to the heart, appear promising since AAV-mediated transgene expression in these organs has recently been shown to be highly efficient (Fisher et al., (1996) J. Virol., 70, 520-532; Flotte et al., 1993; Kaplitt et al., 1994; 1996; Koeberl et al., 1997; McCown et al., (1996) Brain Res., 713, 99-107; Ping et al., (1996) Microcirculation, 3, 225-228; Xiao et al., (1996) J. Virol., 70, 8098-8108).

### Other Viral Vectors

[0401] Other viral vectors are employed as expression constructs in the present methods and compositions. Vectors derived from viruses such as vaccinia virus (Ridgeway, (1988) In: Vectors: A survey of molecular cloning vectors and their uses, pp. 467-492; Baichwal and Sugden, (1986) In, Gene Transfer, pp. 117-148; Coupar et al., Gene, 68:1-10, 1988) canary poxvirus, and herpes viruses are employed. These viruses offer several features for use in gene transfer into various mammalian cells.

[0402] Once the construct has been delivered into the cell, the nucleic acid encoding the transgene are positioned and expressed at different sites. In certain embodiments, the nucleic acid encoding the transgene is stably integrated into the genome of the cell. This integration is in the cognate location and orientation via homologous recombination (gene replacement) or it is integrated in a random, non-specific location (gene augmentation). In yet further embodiments, the nucleic acid is stably maintained in the cell as a separate, episomal segment of DNA. Such nucleic acid segments or “episomes” encode sequences sufficient to permit maintenance and replication independent of or in synchronization with the host cell cycle. How the expression construct is delivered to a cell and where in the cell the nucleic acid remains is dependent on the type of expression construct employed.

### Methods for Treating a Disease

[0403] The present methods also encompass methods of treatment or prevention of a disease where administration of cells by, for example, infusion, may be beneficial.

[0404] Cells, such as, for example, T cells, tumor infiltrating lymphocytes, natural killer cells, natural killer T cells, or progenitor cells, such as, for example, hematopoietic stem cells, mesenchymal stromal cells, stem cells, pluripotent stem cells, and embryonic stem cells may be used for cell therapy. The cells may be from a donor, or may be cells obtained from the patient. The cells may, for example, be used in regeneration, for example, to replace the function of diseased cells. The cells may also be modified to express a heterologous gene so that biological agents may be delivered to specific microenvironments such as, for example, diseased bone marrow or metastatic deposits. Mesenchymal stromal cells have also, for example, been used to provide immunosuppressive activity, and may be used in the treatment of graft versus host disease and autoimmune disorders. The cells provided in the present application contain a safety switch that may be valuable in a situation where following cell therapy, the activity of the therapeutic cells needs to be increased, or decreased. For example, where T cells that express a chimeric antigen receptor are provided to the patient, in some situations there may be an adverse event, such as off-target toxicity. Ceasing the administration of the ligand would return the therapeutic T cells to a non-activated state, remaining at a low, non-toxic, level of expression. Or, for example, the therapeutic cell may work to decrease the tumor cell, or tumor size, and may no longer be needed. In this situation, administration of the ligand may cease, and the therapeutic cells would no longer be activated. If the tumor cells return, or the tumor size increases following the initial therapy, the ligand may be administered again, in order to activate the chimeric antigen receptor-expressing T cells, and re-treat the patient.

[0405] By “therapeutic cell” is meant a cell used for cell therapy, that is, a cell administered to a subject to treat or prevent a condition or disease. In such cases, where the cells have a negative effect, the present methods may be used to remove the therapeutic cells through selective apoptosis.

[0406] In other examples, T cells are used to treat various diseases and conditions, and as a part of stem cell transplantation. An adverse event that may occur after haploidentical T cell transplantation is graft versus host disease (GvHD). The likelihood of GvHD occurring increases with the increased number of T cells that are transplanted. This limits the number of T cells that may be infused. By having the ability to selectively remove the infused T cells in the event of GvHD in the patient, a greater number of T cells may be infused, increasing the number to greater than 10⁶, greater than 10⁷, greater than 10⁸, or greater than 10⁹ cells. The number of T cells/kg body weight that may be administered may be, for example, from about 1×10⁴ T cells/kg body weight to about 9×10⁷ T cells/kg body weight, for example about 1, 2, 3, 4, 5, 6, 7, 8, or 9×10⁴; about 1, 2, 3, 4, 5, 6, 7, 8, or 9×10⁵; about 1, 2, 3, 4, 5, 6, 7, 8, or 9×10⁶; or about 1, 2, 3, 4, 5, 6, 7, 8, or 9×10⁷ T cells/kg body weight. In other examples, therapeutic cells other than T cells may be used. The number of therapeutic cells/kg body weight that may be administered may be, for example, from about 1×10⁴ T cells/kg body weight to about 9×10⁷ T cells/kg body weight, for example about 1, 2, 3, 4, 5, 6, 7, 8, or 9×10⁴; about 1, 2, 3, 4, 5, 6, 7, 8, or 9×10⁵; about 1, 2, 3, 4, 5, 6, 7, 8, or 9×10⁶; or about 1, 2, 3, 4, 5, 6, 7, 8, or 9×10⁷ therapeutic cells/kg body weight.

[0407] The term “unit dose” as it pertains to the inoculum refers to physically discrete units suitable as unitary dosages for mammals, each unit containing a predetermined quantity of pharmaceutical composition calculated to produce the desired immunogenic effect in association with the required diluent. The specifications for the unit dose of an inoculum are dictated by and are dependent upon the unique characteristics of the pharmaceutical composition and the particular immunologic effect to be achieved.

[0408] An effective amount of the pharmaceutical composition, such as the multimeric ligand presented herein, would be the amount that achieves this selected result of selectively removing the cells that include the Caspase-9 vector, such that over 60%, 70%, 80%, 85%, 90%, 95%, or 97% of the Caspase-9 expressing cells are killed. The term is also synonymous with “sufficient amount.” The effective amount for any particular application can vary depending on such factors as the disease or condition being treated, the particular composition being administered, the size of the subject, and/or the severity of the disease or condition. One can empirically determine the effective amount of a particular composition presented herein without necessitating undue experimentation.

[0409] The terms “contacted” and “exposed,” when applied to a cell, tissue or organism, are used herein to discuss the process by which the pharmaceutical composition and/or another agent, such as for example a chemotherapeutic or radiotherapeutic agent, are delivered to a target cell, tissue or organism or are placed in direct juxtaposition with the target cell, tissue or organism. To achieve cell killing or stasis, the pharmaceutical composition and/or additional agent(s) are delivered to one or more cells in a combined amount effective to kill the cell(s) or prevent them from dividing. The administration of the pharmaceutical composition may precede, be co-current with and/or follow the other agent(s) by intervals ranging from minutes to weeks. In embodiments where the pharmaceutical composition and other agent(s) are applied separately to a cell, tissue or organism, one would generally ensure that a significant period of time did not expire between the times of each delivery, such that the pharmaceutical composition and agent(s) would still be able to exert an advantageously combined effect on the cell, tissue or organism. For example, in such instances, it is contemplated that one may contact the cell, tissue or organism with two, three, four or more modalities substantially simultaneously (i.e., within less than about a minute) with the pharmaceutical composition. In other aspects, one or more agents may be administered within of from substantially simultaneously, about 1 minute, to about 24 hours to about 7 days to about 1 to about 8 weeks or more, and any range derivable therein, prior to and/or after administering the expression vector. Yet further, various combination regimens of the pharmaceutical composition presented herein and one or more agents may be employed.

### Optimized and Personalized Therapeutic Treatment

[0410] The induction of apoptosis after administration of the dimer may be optimized by determining the stage of graft versus host disease, or the number of undesired therapeutic cells that remain in the patient.

[0411] For example, determining that a patient has GvHD, and the stage of the GvHD, provides an indication to a clinician that it may be necessary to induce Caspase-9 associated apoptosis by administering the multimeric ligand. In another example, determining that a patient has a reduced level of GvHD after treatment with the multimeric ligand may indicate to the clinician that no additional dose of the multimeric ligand is needed. Similarly, after treatment with the multimeric ligand, determining that the patient continues to exhibit GvHD symptoms, or suffers a relapse of GvHD may indicate to the clinician that it may be necessary to administer at least one additional dose of multimeric ligand. The term “dosage” is meant to include both the amount of the dose and the frequency of administration, such as, for example, the timing of the next dose

[0412] In other embodiments, following administration of therapeutic cells, for example, therapeutic cells which express a chimeric antigen receptor in addition to the inducible Caspase-9 polypeptide, in the event of a need to reduce the number of modified cells or in vivo modified cells, the multimeric ligand may be administered to the patient. In these embodiments, the methods comprise determining the presence or absence of a negative symptom or condition, such as Graft vs Host Disease, or off target toxicity, and administering a dose of the multimeric ligand. The methods may further comprise monitoring the symptom or condition and administering an additional dose of the multimeric ligand in the event the symptom or condition persists. This monitoring and treatment schedule may continue while the therapeutic cells that express chimeric antigen receptors or chimeric signaling molecules remain in the patient.

[0413] An indication of adjusting or maintaining a subsequent drug dose, such as, for example, a subsequence dose of the multimeric ligand, and/or the subsequent drug dosage, can be provided in any convenient manner. An indication may be provided in tabular form (e.g., in a physical or electronic medium) in some embodiments. For example, the graft versus host disease observed symptoms may be provided in a table, and a clinician may compare the symptoms with a list or table of stages of the disease. The clinician then can identify from the table an indication for subsequent drug dose. In certain embodiments, an indication can be presented (e.g., displayed) by a computer, after the symptoms or the GvHD stage is provided to the computer (e.g., entered into memory on the computer). For example, this information can be provided to a computer (e.g., entered into computer memory by a user or transmitted to a computer via a remote device in a computer network), and software in the computer can generate an indication for adjusting or maintaining a subsequent drug dose, and/or provide the subsequent drug dose amount.

[0414] Once a subsequent dose is determined based on the indication, a clinician may administer the subsequent dose or provide instructions to adjust the dose to another person or entity. The term “clinician” as used herein refers to a decision maker, and a clinician is a medical professional in certain embodiments. A decision maker can be a computer or a displayed computer program output in some embodiments, and a health service provider may act on the indication or subsequent drug dose displayed by the computer. A decision maker may administer the subsequent dose directly (e.g., infuse the subsequent dose into the subject) or remotely (e.g., pump parameters may be changed remotely by a decision maker).

[0415] In some examples, a dose, or multiple doses of the ligand may be administered before clinical manifestations of GvHD, or other symptoms, such as CRS symptoms, are apparent. In this example, cell therapy is terminated before the appearance of negative symptoms. In other embodiments, such as, for example, hematopoietic cell transplant for the treatment of a genetic disease, the therapy may be terminated after the transplant has made progress toward engraftment, but before clinically observable GvHD, or other negative symptoms, can occur. In other examples, the ligand may be administered to eliminate the modified cells in order to eliminate on target/off-tumor cells, such as, for example, healthy B cells co-expressing the B cell-associated target antigen.

[0416] Methods as presented herein include without limitation the delivery of an effective amount of an activated cell, a nucleic acid or an expression construct encoding the same. An “effective amount” of the pharmaceutical composition, generally, is defined as that amount sufficient to detectably and repeatedly to achieve the stated desired result, for example, to ameliorate, reduce, minimize or limit the extent of the disease or its symptoms. Other more rigorous definitions may apply, including elimination, eradication or cure of disease. In some embodiments there may be a step of monitoring the biomarkers to evaluate the effectiveness of treatment and to control toxicity.

### Dual Control of Therapeutic Cells and Heterdimerizer Control of Apoptosis for Controlled Therapy

[0417] Nucleic acids and cells provided herein may be used to achieve dual control of therapeutic cells for controlled therapy. For example, the subject may be diagnosed with a condition, such as a tumor, where there is a need to deliver targeted chimeric antigen receptor therapy. Methods discussed herein provide several examples of ways to control therapy in order to induce activity of the CAR-expressing therapeutic cells, and also to provide a safety switch should there be a need to discontinue therapy completely, or to reduce the number or percent of the therapeutic cells in the subject.

[0418] In certain examples, modified T cells are administered to a subject that express the following polypeptides: 1. A chimeric polypeptide (iMyD88/CD40, or “iMC”) that comprises two or more FKBP12 ligand binding regions and a costimulatory polypeptide or polypeptides, such as, for example, MyD88 or truncated MyD88 and CD40; 2. A chimeric proapoptotic polypeptide that comprises one or more FRB ligand binding regions and a Caspase-9 polypeptide; 3. A chimeric antigen receptor polypeptide comprising an antigen recognition moiety that binds to a target antigen. In this example, the target antigen is a tumor antigen present on tumor cells in the subject. Following administration, the ligand AP1903 may be administered to the subject, which induces iMC activation of the CAR-T cell. The therapy is monitored, for example, the tumor size or growth may be assessed during the course of therapy. One or more doses of the ligand may be administered during the course of therapy.

[0419] Therapy may be modulated by discontinuing administration of AP1903, which may lower the activation level of the CAR-T cell. To discontinue CAR-T cell therapy, the safety switch—chimeric Caspase-9 polypeptide may be activated by administering a rapalog, which binds to the FRB ligand binding region. The amount and dosing schedule of the rapalog may be determined based on the level of CAR-T cell therapy that is needed. As a safety switch, the dose of the rapalog is an amount effective to remove at least 90%, 95%, 97%, 98%, or 99% of the administered modified cells. In other examples, the dose is an amount effective to remove up to 30%, 40%, 50%, 60%, 70%, 80%, 90, 95%, or 100% of the cells that express the chimeric caspase polypeptide, if there is a need to reduce the level of CAR-T cell therapy, but not completely stop the therapy. This may be measured, for example, by obtaining a sample from the subject before inducing the safety switch, before administering the rapamycin or rapalog, and obtaining a sample following administration of the rapamycin or rapalog, at, for example 0.5, 1, 2, 3, 4, 5, 6, 7, 8, 9, 10 hours, or 1, 2, 3, 4, 5 days following administration, and comparing the number or concentration of chimeric caspase-expressing cells between the two samples by, for example, any method available, including, for example, detecting the presence of a marker. This method of determining percent removal of the cells may also be used where the inducing ligand is AP1903 or binds to the FKBP12 or FKBP12 variant multimerizing region.

[0420] In some examples, the inducible MyD88/CD40 chimeric polypeptide also comprises the chimeric antigen receptor. In these examples, where the two polypeptides are present on the same molecule, the chimeric polypeptide may comprise one or more ligand binding regions.

[0421] Chemical Induction of protein Dimerization (CID) has been effectively applied to make cellular suicide or apoptosis inducible with the small molecule homodimerizing ligand, rimiducid (AP1903). This technology underlies the “safety switch” incorporated as a gene therapy adjunct in cell transplants (1, 2). The central tenet of the technology is that normal cellular regulatory pathways that rely on protein-protein interaction as part of a signaling pathway can be adapted to ligand-dependent, conditional control if a small molecule dimerizing drug is used to control the protein-protein oligomerization event (3-5). Induced dimerization of a fusion protein comprising Caspase-9 and FKBP12 or an FKBP12 variant (i.e., “iCaspase9/iCasp9/iC9) using a homodimerizing ligand, such as rimiducid, AP1510 or AP20187, can rapidly effect cell death. Caspase-9 is an initiating caspase that acts as a “gate-keeper” of the apoptotic process (6). Normally, pro-apoptotic molecules (e.g., cytochrome c) released from the mitochondria of apoptotic cells alter the conformation of Apaf-1, a caspase-9-binding scaffold, leading to its oligomerization and formation of the “apoptosome”. This alteration facilitates caspase-9 dimerization and cleavage of its latent form into an active molecule that, in turn, cleaves the “downstream” apoptosis effector, caspase-3, leading to irreversible cell death. Rimiducid binds directly with two FKBP12-V36 moieties and can direct the dimerization of fusion proteins that include FKBP12-V36 (1, 2). iC9 engagement with rimiducid circumvents the need for Apaf1 conversion to the active apoptosome. In this example, the fusion of caspase-9 to protein moieties that engage a heterodimerizing ligand is assayed for its ability to direct its activation and cell death with similar efficacy to rimiducid-mediated iC9 activation.

[0422] MyD88 and CD40 were chosen as the basis of the iMC activation switch. MyD88 plays a central signaling role in the detection of pathogens or cell injury by antigen-presenting cells (APCs), like dendritic cells (DCs). Following exposure to pathogen- or necrotic cells-derived “danger” molecules”, a subclass of “pattern recognition receptors”, called Toll-Like Receptors (TLRs) are activated, leading to the aggregation and activation of adapter molecule, MyD88, via homologous TLR-IL1RA (TIR) domains on both proteins. MyD88, in turn, activates downstream signaling, via the rest of the protein. This leads to the upregulation of costimulatory proteins, like CD40, and other proteins, like MHC and proteases, needed for antigen processing and presentation. The fusion of signaling domains from MyD88 and CD40 with two Fv domains, provides iMC (also MC.FvFv), which potently activated DCs following exposure to rimiducid (7). It was later found that iMC is a potent costimulatory protein for T cells, as well.

[0423] Rapamycin is a natural product macrolide that binds with high affinity (<1 nM) to FKBP12 and together initiates the high-affinity, inhibitory interaction with the FKBP-Rapamycin-Binding (FRB) domain of mTOR (8). FRB is small (89 amino acids) and can thereby be used as a protein “tag” or “handle” when appended to many proteins (9-11). Coexpression of a FRB-fused protein with a FKBP12-fused protein renders their approximation rapamycin-inducible (12-16). This and the examples that follow provide experiments and results designed to test whether expression of Caspase-9 bound with FKBP and FRB in tandem can also direct apoptosis and serve as the basis for a cell safety switch regulated by the orally available ligand, rapamycin. Further, an inducible MyD88/CD40 rapamycin-sensitive costimulatory polypeptide was developed by fusing FKBP and FRB in tandem with the MyD88/CD40 polypeptide. For this tandem fusion of FKBP and FRB, derivatives of rapamycin (rapalogs) may also be used that do not inhibit mTOR at a low, therapeutic dose. For example, rapamycin, or these rapamycin analogs may bind with selected, MC-FKBP-fused mutant FRB domains, using a heterdimerizer to homodimerize two MC-FKBP-FRB polypeptides.

[0424] The following references are referred to in this section, and are hereby incorporated by reference herein in their entireties.
[0425] 1. Straathof K C, Pule M A, Yotnda P, Dotti G, Vanin E F, Brenner M K, Heslop H E, Spencer D M, and Rooney C M. An inducible caspase 9 safety switch for T-cell therapy. Blood. 2005; 105(11):4247-54.
[0426] 2. Fan L, Freeman K W, Khan T, Pham E, and Spencer D M. Improved artificial death switches based on caspases and FADD. Hum Gene Ther. 1999; 10(14):2273-85.
[0427] 3. Spencer D M, Wandless T J, Schreiber S L, and Crabtree G R. Controlling signal transduction with synthetic ligands. Science. 1993; 262(5136):1019-24.
[0428] 4. Acevedo V D, Gangula R D, Freeman K W, Li R, Zhang Y, Wang F, Ayala G E, Peterson L E, Ittmann M, and Spencer D M. Inducible FGFR-1 activation leads to irreversible prostate adenocarcinoma and an epithelial-to-mesenchymal transition. Cancer Cell. 2007; 12(6):559-71.
[0429] 5. Spencer D M, Belshaw P J, Chen L, Ho S N, Randazzo F, Crabtree G R, and Schreiber S L. Functional analysis of Fas signaling in vivo using synthetic inducers of dimerization. Curr Biol. 1996; 6(7):839-47.
[0430] 6. Strasser A, Cory S, and Adams J M. Deciphering the rules of programmed cell death to improve therapy of cancer and other diseases. EMBO J. 2011; 30(18):3667-83.
[0431] 7. Narayanan P, Lapteva N, Seethammagari M, Levitt J M, Slawin K M, and Spencer D M. A composite MyD88/CD40 switch synergistically activates mouse and human dendritic cells for enhanced antitumor efficacy. J Clin Invest. 2011; 121(4):1524-34.
[0432] 8. Sabatini D M, Erdjument-Bromage H, Lui M, Tempst P, and Snyder S H. RAFT1: a mammalian protein that binds to FKBP12 in a rapamycin-dependent fashion and is homologous to yeast TORs. Cell. 1994; 78(1):35-43.
[0433] 9. Brown E J, Albers M W, Shin T B, Ichikawa K, Keith C T, Lane W S, and Schreiber S L. A mammalian protein targeted by G1-arresting rapamycin-receptor complex. Nature. 1994; 369(6483):756-8.
[0434] 10. Chen J, Zheng X F, Brown E J, and Schreiber S L. Identification of an 11-kDa FKBP12-rapamycin-binding domain within the 289-kDa FKBP12-rapamycin-associated protein and characterization of a critical serine residue. Proc Natl Acad Sci USA. 1995; 92(11):4947-51.
[0435] 11. Choi J, Chen J, Schreiber S L, and Clardy J. Structure of the FKBP12-rapamycin complex interacting with the binding domain of human FRAP. Science. 1996; 273(5272):239-42.
[0436] 12. Ho S N, Biggar S R, Spencer D M, Schreiber S L, and Crabtree G R. Dimeric ligands define a role for transcriptional activation domains in reinitiation. Nature. 1996; 382(6594):822-6.
[0437] 13. Klemm J D, Beals C R, and Crabtree G R. Rapid targeting of nuclear proteins to the cytoplasm. Curr Biol. 1997; 7(9):638-44.
[0438] 14. Bayle J H, Grimley J S, Stankunas K, Gestwicki J E, Wandless T J, and Crabtree G R. Rapamycin analogs with differential binding specificity permit orthogonal control of protein activity. Chem Biol. 2006; 13(1):99-107.
[0439] 15. Stankunas K, Bayle J H, Gestwicki J E, Lin Y M, Wandless T J, and Crabtree G R. Conditional protein alleles using knockin mice and a chemical inducer of dimerization. Mol Cell. 2003; 12(6):1615-24.
[0440] 16. Stankunas K, Bayle J H, Havranek J J, Wandless T J, Baker D, Crabtree G R, and Gestwicki J E. Rescue of Degradation-Prone Mutants of the FK506-Rapamycin Binding (FRB) Protein with Chemical Ligands. Chembiochem. 2007.

### Dual-Switch, Chimeric Pro-Apoptotic Polypeptides

[0441] The activity of chimeric polypeptides FRB.FKBP_{V}.ΔC9 (dual-control), FKBP_{V}.ΔC9, and or FRB.FKBP.ΔC9 were assayed in response to either the heterodimer, rapamycin, or the homodimer, rimiducid.

[0442] Chemical Induction of Dimerization (CID) with small molecules is an effective technology used to generate switches of protein function to alter cell physiology. Rimiducid or AP1903 is a highly specific and efficient dimerizer composed of two identical protein-binding surfaces (based on FK506) arranged tail-to-tail, each with high affinity and specificity for an FKBP mutant, FKBP12v36 or FKBPᵥ. FKBP12v36 is a modified version of FKBP12, in which phenylalanine 36, is replaced with the smaller hydrophobic residue, valine, which accommodates the bulky modification on the FKBP12-binding site of AP1903 [1]. This change increases binding of AP1903 to FKBP12v36 (˜0.1 nM), while binding of AP1903 to native FKBP12 is reduced around 100-fold relative to FK506 [1, 2]. Attachment of one or more Fv domains onto one or more cell signaling molecules that normally rely on homodimerization can convert that protein to rimiducid-induced signaling control. Homodimerization with rimiducid is the basis of both the inducible Caspase-9 (iCaspase-9) “safety switch” and the inducible MyD88/CD40 (iMC) “activation switch” for cellular therapy.

[0443] Rapamycin binds to FKBP12, but unlike rimiducid, rapamycin also binds to the FKBP12-Rapamycin-Binding (FRB) domain of mTOR and can induce heterodimerization of signaling domains that are fused to FKBP12 with fusions containing FRB. Expression of Caspase-9 fused with FKBP and FRB in tandem (in both orientations: FKBP.FRB.ΔC9 or FRB.FKBP.ΔC9) can direct apoptosis and serve as the basis for a cell safety switch regulated by the orally available ligand, rapamycin. Importantly, since rimiducid contains a bulky modification on the FKBP12-binding site, this dimerizer is not able to bind to wild type FKBP12.

[0444] The FRB.FKBP_{V}.ΔC9 switch provides the option to activate caspase-9 with either rimiducid or rapamycin by mutating the FKBP domain to FKBPv. This flexibility in terms of choice of activating drug may be important in a clinical setting where the clinician can choose to administer the drug based on its specific pharmacological properties. Additionally, this switch provides a molecule to allow for direct comparison between the drug-activating kinetics of rimiducid and rapamycin where the effector is contained within a single molecule.
[0445] 1. D. Spencer, et al., Science, vol. 262, pp. 1019-1024, 1993.
[0446] 2. T. Clackson, et al., Proc natl Acad Sci USA, vol. 95, pp. 10437-10442, 1998.

### Formulations and Routes for Administration to Patients

[0447] Where clinical applications are contemplated, it will be necessary to prepare pharmaceutical compositions—expression constructs, expression vectors, fused proteins, transfected or transduced cells, in a form appropriate for the intended application. Generally, this will entail preparing compositions that are essentially free of pyrogens, as well as other impurities that could be harmful to humans or animals.

[0448] The multimeric ligand, such as, for example, AP1903 (INN rimiducid, may be delivered, for example at doses of about 0.1 to 10 mg/kg subject weight, of about 0.1 to 5 mg/kg subject weight, of about 0.2 to 4 mg/kg subject weight, of about 0.3 to 3 mg/kg subject weight, of about 0.3 to 2 mg/kg subject weight, or about 0.3 to 1 mg/kg subject weight, for example, about 0.1, 0.2, 0.3, 0.4, 0.5, 0.6, 0.7, 0.8, 0.9, 1.0, 1.5, 2, 2.5, 3, 3.5, 4, 4.5, 5, 6, 7, 8, 9, or 10 mg/kg subject weight. In some embodiments, the ligand is provided at 0.4 mg/kg per dose, for example at a concentration of 5 mg/mL. Vials or other containers may be provided containing the ligand at, for example, a volume per vial of about 0.25 ml to about 10 ml, for example, about 0.25, 0.5, 1, 1.5, 2, 2.5, 3, 3.5, 4, 4.5, 5, 5.5, 6, 6.5, 7, 7.5, 8, 8.5, 9, 9.5, or 10 ml, for example, about 2 ml.

[0449] One may generally desire to employ appropriate salts and buffers to render delivery vectors stable and allow for uptake by target cells. Buffers also may be employed when recombinant cells are introduced into a patient. Aqueous compositions comprise an effective amount of the vector to cells, dissolved or dispersed in a pharmaceutically acceptable carrier or aqueous medium. Such compositions also are referred to as inocula. A pharmaceutically acceptable carrier includes any and all solvents, dispersion media, coatings, antibacterial and antifungal agents, isotonic and absorption delaying agents and the like. The use of such media and agents for pharmaceutically active substances is known. Except insofar as any conventional media or agent is incompatible with the vectors or cells, its use in therapeutic compositions is contemplated. Supplementary active ingredients also can be incorporated into the compositions.

[0450] The active compositions may include classic pharmaceutical preparations. Administration of these compositions will be via any common route so long as the target tissue is available via that route. This includes, for example, oral, nasal, buccal, rectal, vaginal or topical. Alternatively, administration may be by orthotopic, intradermal, subcutaneous, intramuscular, intraperitoneal or intravenous injection. Such compositions would normally be administered as pharmaceutically acceptable compositions, discussed herein.

[0451] The pharmaceutical forms suitable for injectable use include sterile aqueous solutions or dispersions and sterile powders for the extemporaneous preparation of sterile injectable solutions or dispersions. In all cases the form is sterile and is fluid to the extent that easy syringability exists. It is stable under the conditions of manufacture and storage and is preserved against the contaminating action of microorganisms, such as bacteria and fungi. The carrier can be a solvent or dispersion medium containing, for example, water, ethanol, polyol (for example, glycerol, propylene glycol, and liquid polyethylene glycol, and the like), suitable mixtures thereof, and vegetable oils. The proper fluidity can be maintained, for example, by the use of a coating, such as lecithin, by the maintenance of the required particle size in the case of dispersion and by the use of surfactants. The prevention of the action of microorganisms can be brought about by various antibacterial and antifungal agents, for example, parabens, chlorobutanol, phenol, sorbic acid, thimerosal, and the like. In certain examples, isotonic agents, for example, sugars or sodium chloride may be included. Prolonged absorption of the injectable compositions can be brought about by the use in the compositions of agents delaying absorption, for example, aluminum monostearate and gelatin.

[0452] For oral administration, the compositions may be incorporated with excipients and used in the form of non-ingestible mouthwashes and dentifrices. A mouthwash may be prepared incorporating the active ingredient in the required amount in an appropriate solvent, such as a sodium borate solution (Dobell's Solution). Alternatively, the active ingredient may be incorporated into an antiseptic wash containing sodium borate, glycerin and potassium bicarbonate. The active ingredient also may be dispersed in dentifrices, including, for example: gels, pastes, powders and slurries. The active ingredient may be added in a therapeutically effective amount to a paste dentifrice that may include, for example, water, binders, abrasives, flavoring agents, foaming agents, and humectants.

[0453] The compositions may be formulated in a neutral or salt form. Pharmaceutically-acceptable salts include, for example, the acid addition salts (formed with the free amino groups of the protein) and which are formed with inorganic acids such as, for example, hydrochloric or phosphoric acids, or such organic acids as acetic, oxalic, tartaric, mandelic, and the like. Salts formed with the free carboxyl groups can also be derived from inorganic bases such as, for example, sodium, potassium, ammonium, calcium, or ferric hydroxides, and such organic bases as isopropylamine, trimethylamine, histidine, procaine and the like.

[0454] Upon formulation, solutions will be administered in a manner compatible with the dosage formulation and in such amount as is therapeutically effective. The formulations are easily administered in a variety of dosage forms such as injectable solutions, drug release capsules and the like. For parenteral administration in an aqueous solution, for example, the solution may be suitably buffered if necessary and the liquid diluent first rendered isotonic with sufficient saline or glucose. These particular aqueous solutions are especially suitable for intravenous, intramuscular, subcutaneous and intraperitoneal administration. In this connection, sterile aqueous media can be employed. For example, one dosage could be dissolved in 1 ml of isotonic NaCl solution and either added to 1000 ml of hypodermoclysis fluid or injected at the proposed site of infusion, (see for example, “Remington's Pharmaceutical Sciences” 15th Edition, pages 1035-1038 and 1570-1580). Some variation in dosage will necessarily occur depending on the condition of the subject being treated. The person responsible for administration will, in any event, determine the appropriate dose for the individual subject. Moreover, for human administration, preparations may meet sterility, pyrogenicity, and general safety and purity standards as required by FDA Office of Biologics standards.

### EXAMPLES

[0455] The examples set forth below illustrate certain embodiments and do not limit the technology.

[0456] Mechanisms for selectively ablating the donor cells have been studied as safety switches for cellular therapies, but there have been complications. Some experience with safety-switch genes to date has been in T lymphocytes since immunotherapy with these cells has proved efficacious as treatment for viral infections and malignancies (Walter, E. A., et al., N. Engl. J. Med. 1995, 333:1038-44; Rooney, C. M., et al., Blood. 1998, 92:1549-55; Dudley, M. E., et al., Science 2002, 298:850-54; Marjit, W. A., et al., Proc. Natl. Acad. Sci. USA 2003, 100:2742-47). The herpes simplex virus I-derived thymidine kinase (HSVTK) gene has been used as an in vivo suicide switch in donor T-cell infusions to treat recurrent malignancy and Epstein Barr virus (EBV) lymphoproliferation after hematopoietic stem cell transplantation (Bonini C, et al., Science. 1997, 276:1719-1724; Tiberghien P, et al., Blood. 2001, 97:63-72). However, destruction of T cells causing graft-versus-host disease was incomplete, and the use of gancyclovir (or analogs) as a pro-drug to activate HSV-TK precludes administration of gancyclovir as an antiviral drug for cytomegalovirus infections. This mechanism of action also requires interference with DNA synthesis, relying on cell division, so that cell killing may be protracted over several days and incomplete, producing a lengthy delay in clinical benefit (Ciceri, F., et al., Lancet Oncol. 2009, 262:1019-24). Moreover, HSV-TK-directed immune responses have resulted in elimination of HSV-TK-transduced cells, even in immunosuppressed human immunodeficiency virus and bone marrow transplant patients, compromising the persistence and hence efficacy of the infused T cells. HSV-TK is also virus-derived, and therefore potentially immunogenic (Bonini C, et al., Science. 1997, 276:1719-1724; Riddell S R, et al., Nat Med. 1996, 2:216-23). The E coli-derived cytosine deaminase gene has also been used clinically (Freytag S O, et al., Cancer Res. 2002, 62:4968-4976), but as a xenoantigen it may be immunogenic and thus incompatible with T-cell-based therapies that require long-term persistence. Transgenic human CD20, which can be activated by a monoclonal chimeric anti-CD20 antibody, has been proposed as a nonimmunogenic safety system (Introna M, et al., Hum Gene Ther. 2000, 11: 611-620).

[0457] The following section provides examples of method of providing a safety switch in cells used for cellular therapy, using a Caspase-9 chimeric protein.

### Example 1: Construction and Evaluation of Caspase-9 Suicide Switch Expression Vectors

[0458] Vector Construction and Confirmation of Expression

[0459] A safety switch that can be stably and efficiently expressed in human T cells is presented herein. The system includes human gene products with low potential immunogenicity that have been modified to interact with a small molecule dimerizer drug that is capable of causing the selective elimination of transduced T cells expressing the modified gene. Additionally, the inducible Caspase-9 maintains function in T cells overexpressing antiapoptotic molecules.

[0460] Expression vectors suitable for use as a therapeutic agent were constructed that included a modified human Caspase-9 activity fused to a human FK506 binding protein (FKBP), such as, for example, FKBP12v36. The Caspase-9/FK506 hybrid activity can be dimerized using a small molecule pharmaceutical. Full length, truncated, and modified versions of the Caspase-9 activity were fused to the ligand binding domain, or multimerizing region, and inserted into the retroviral vector MSCV.IRES.GRP, which also allows expression of the fluorescent marker, GFP. FIG. 1A illustrates the full length, truncated and modified Caspase-9 expression vectors constructed and evaluated as a suicide switch for induction of apoptosis.

[0461] The full-length inducible Caspase-9 molecule (F′-F-C-Casp9) includes 2, 3, or more FK506 binding proteins (FKBPs—for example, FKBP12v36 variants) linked with a Gly-Ser-Gly-Gly-Gly-Ser linker (SEQ ID NO: 285) to the small and large subunit of the Caspase molecule (see FIG. 1A). Full-length inducible Caspase-9 (F′F-C-Casp9.I.GFP) has a full-length Caspase-9, also includes a Caspase recruitment domain (CARD; GenBank NM001 229) linked to 2 12-kDa human FK506 binding proteins (FKBP12; GenBank AH002 818) that contain an F36V mutation (FIG. 1A). The amino acid sequence of one or more of the FKBPs (F′) was codon-wobbled (e.g., the 3^{rd} nucleotide of each amino acid codon was altered by a silent mutation that maintained the originally encoded amino acid) to prevent homologous recombination when expressed in a retrovirus. F′F-C-Casp9C3S includes a cysteine to serine mutation at position 287 that disrupts its activation site. In constructs F′F-Casp9, F-C-Casp9, and F′-Casp9, either the Caspase activation domain (CARD), one FKBP, or both, were deleted, respectively. All constructs were cloned into MSCV.IRES.GFP as EcoRI-XhoI fragments.

[0462] 293T cells were transfected with each of these constructs and 48 hours after transduction expression of the marker gene GFP was analyzed by flow cytometry. In addition, 24 hours after transfection, 293T cells were incubated overnight with 100 nM CID and subsequently stained with the apoptosis marker annexin V. The mean and standard deviation of transgene expression level (mean GFP) and number of apoptotic cells before and after exposure to the chemical inducer of dimerization (CID) (% annexin V within GFP˜cells) from 4 separate experiments are shown in the second through fifth columns of the table in FIG. 1A. In addition to the level of GFP expression and staining for annexin V, the expressed gene products of the full length, truncated and modified Caspase-9 were also analyzed by western blot to confirm the Caspase-9 genes were being expressed and the expressed product was the expected size. The results of the western blot are presented in FIG. 1B.

[0463] Coexpression of the inducible Caspase-9 constructs of the expected size with the marker gene GFP in transfected 293T cells was demonstrated by Western blot using a Caspase-9 antibody specific for amino acid residues 299-318, present both in the full-length and truncated Caspase molecules as well as a GFP-specific antibody. Western blots were performed as presented herein.

[0464] Transfected 293T cells were resuspended in lysis buffer (50% Tris/Gly, 10% sodium dodecyl sulfate [SDS], 4% beta-mercaptoethanol, 10% glycerol, 12% water, 4% bromophenol blue at 0.5%) containing aprotinin, leupeptin, and phenylmethylsulfonyl fluoride (Boehringer, Ingelheim, Germany) and incubated for 30 minutes on ice. After a 30-minute centrifugation, supernatant was harvested; mixed 1:2 with Laemmli buffer (Bio-Rad, Hercules, Calif.), boiled and loaded on a 10% SDS-polyacrylamide gel. The membrane was probed with rabbit anti-Caspase-9 (amino acid residues 299-3 18) immunoglobulin G (IgG; Affinity BioReagents, Golden, Colo.; 1:500 dilution) and with mouse anti-GFP IgG (Covance, Berkeley, Calif.; 1:25,000 dilution). Blots were then exposed to appropriate peroxidase-coupled secondary antibodies and protein expression was detected with enhanced chemiluminescence (ECL; Amersham, Arlington Heights, Ill.). The membrane was then stripped and reprobed with goat polyclonal antiactin (Santa Cruz Biotechnology; 1:500 dilution) to check equality of loading.

[0465] Additional smaller size bands, seem in FIG. 1B, likely represent degradation products. Degradation products for the F′F-C-Casp9 and F′F-Casp9 constructs may not be detected due to a lower expression level of these constructs as a result of their basal activity. Equal loading of each sample was confirmed by the substantially equal amounts of actin shown at the bottom of each lane of the western blot, indicating substantially similar amounts of protein were loaded in each lane.

[0466] An example of a chimeric polypeptide that may be expressed in the modified cells is provided herein. In this example, a single polypeptide is encoded by the nucleic acid vector. The inducible Caspase-9 polypeptide is separated from the CAR polypeptide during translation, due to skipping of a peptide bond. (Donnelly, M L 2001, J. Gen. Virol. 82:1013-25).

[0467] Evaluation of Caspase-9 Suicide Switch Expression Constructs.

### Cell Lines

[0468] B 95-8 EBV transformed B-cell lines (LCLs), Jurkat, and MT-2 cells (kindly provided by Dr S. Marriott, Baylor College of Medicine, Houston, Tex.) were cultured in RPMI 1640 (Hyclone, Logan, Utah) containing 10% fetal bovine serum (FBS; Hyclone). Polyclonal EBV-specific T-cell lines were cultured in 45% RPMI/45% Clicks (Irvine Scientific, Santa Ana, Calif.)/10% FBS and generated as previously reported. Briefly, peripheral blood mononuclear cells (2×10⁶ per well of a 24-well plate) were stimulated with autologous LCLs irradiated at 4000 rads at a responder-to-stimulator (R/S) ratio of 40:1. After 9 to 12 days, viable cells were restimulated with irradiated LCLs at an R/S ratio of 4:1. Subsequently, cytotoxic T cells (CTLs) were expanded by weekly restimulation with LCLs in the presence of 40 U/mL to 100 U/mL recombinant human interleukin-2 (rhIL-2; Proleukin; Chiron, Emeryville, Calif.).

### Retrovirus Transduction

[0469] For the transient production of retrovirus, 293T cells were transfected with iCasp9/iFas constructs, along with plasmids encoding gag-pol and RD 114 envelope using GeneJuice transfection reagent (Novagen, Madison, Wis.). Virus was harvested 48 to 72 hours after transfection, snap frozen, and stored at ˜80° C. until use. A stable FLYRD 18-derived retroviral producer line was generated by multiple transductions with VSV-G pseudotyped transient retroviral supernatant. FLYRD18 cells with highest transgene expression were single-cell sorted, and the clone that produced the highest virus titer was expanded and used to produce virus for lymphocyte transduction. The transgene expression, function, and retroviral titer of this clone was maintained during continuous culture for more than 8 weeks. For transduction of human lymphocytes, a non-tissue-culture-treated 24-well plate (Becton Dickinson, San Jose, Calif.) was coated with recombinant fibronectin fragment (FN CH-296; Retronectin; Takara Shuzo, Otsu, Japan; 4 μg/mL in PBS, overnight at 4° C.) and incubated twice with 0.5 mL retrovirus per well for 30 minutes at 37° C. Subsequently, 3×10⁵ to 5×10⁵ T cells per well were transduced for 48 to 72 hours using 1 mL virus per well in the presence of 100 U/mL IL-2. Transduction efficiency was determined by analysis of expression of the coexpressed marker gene green fluorescent protein (GFP) on a FACScan flow cytometer (Becton Dickinson). For functional studies, transduced CTLs were either non-selected or segregated into populations with low, intermediate, or high GFP expression using a MoFlo cytometer (Dako Cytomation, Ft Collins, Colo.) as indicated.

### Induction and Analysis of Apoptosis

[0470] CID (AP20187; ARIAD Pharmaceuticals) at indicated concentrations was added to transfected 293T cells or transduced CTLs. Adherent and nonadherent cells were harvested and washed with annexin binding buffer (BD Pharmingen, San Jose, Calif.). Cells were stained with annexin-V and 7-amino-actinomycin D (7-AAD) for 15 minutes according to the manufacturer's instructions (BD Pharmingen). Within 1 hour after staining, cells were analyzed by flow cytometry using CellQuest software (Becton Dickinson).

### Cytotoxicity Assay

[0471] The cytotoxic activity of each CTL line was evaluated in a standard 4-hour ⁵¹Cr release assay, as previously presented. Target cells included autologous LCLs, human leukocyte antigen (HLA) class I-mismatched LCLs and the lymphokine-activated killer cell-sensitive T-cell lymphoma line HSB-2. Target cells incubated in complete medium or 1% Triton X-100 (Sigma, St Louis, Mo.) were used to determine spontaneous and maximum ⁵¹Cr release, respectively. The mean percentage of specific lysis of triplicate wells was calculated as 100×(experimental release−spontaneous release)/(maximal release−spontaneous release).

### Phenotyping

[0472] Cell-surface phenotype was investigated using the following monoclonal antibodies: CD3, CD4, CD8 (Becton Dickinson) and CD56 and TCR-α/β (Immunotech, Miami, Fla.). ΔNGFR-iFas was detected using anti-NGFR antibody (Chromaprobe, Aptos, Calif.). Appropriate matched isotype controls (Becton Dickinson) were used in each experiment. Cells were analyzed with a FACSscan flow cytometer (Becton Dickinson).

### Analysis of Cytokine Production

[0473] The concentration of interferon-γ (IFN-γ), IL-2, IL-4, IL-5, IL-10, and tumor necrosis factor-α (TNFα) in CTL culture supernatants was measured using the Human Th1/Th2 cytokine cytometric Bead Array (BD Pharmingen) and the concentration of IL-12 in the culture supernatants was measured by enzyme-linked immunosorbent assay (ELISA; R&D Systems, Minneapolis, Minn.) according to the instructions of the manufacturer.

### In Vivo Experiments

[0474] Non-obese diabetic severe combined immunodeficient (NOD/SCID) mice, 6 to 8 weeks of age, were irradiated (250 rad) and injected subcutaneously in the right flank with 10×10⁶ to 15×10⁶ LCLs resuspended in Matrigel (BD Bioscience). Two weeks later mice bearing tumors that were approximately 0.5 cm in diameter were injected into the tail vein with a 1:1 mixture of nontransduced and iCasp9.I.GFPhigh-transduced EBV CTLs (total 15×10⁶). At 4 to 6 hours prior and 3 days after CTL infusion, mice were injected intraperitoneally with recombinant hIL-2 (2000 U; Proleukin; Chiron). On day 4, the mice were randomly segregated in 2 groups: 1 group received CID (50 μg AP20187, intraperitoneally) and 1 group received carrier only (16.7% propanediol, 22.5% PEG400, and 1.25% Tween 80, intraperitoneally). On day 7, all mice were killed. Tumors were homogenized and stained with antihuman CD3 (BD Pharmingen). By FACS analysis, the number of GFP⁺ cells within the gated CD3⁺ population was evaluated. Tumors from a control group of mice that received only nontransduced CTLs (total 15×10⁶) were used as a negative control in the analysis of CD3⁺/GFP⁺ cells.

### Optimization of Expression and Function of Inducible Caspase-9

[0475] Caspases 3, 7, and 9 were screened for their suitability as inducible safety-switch molecules both in transfected 293T cells and in transduced human T cells. Only inducible Caspase-9 (iCasp9) was expressed at levels sufficient to confer sensitivity to the chosen CID (e.g., chemical inducer of dimerization). An initial screen indicated that the full length iCasp9 could not be maintained stably at high levels in T cells, possibly due to transduced cells being eliminated by the basal activity of the transgene. The CARD domain is involved in physiologic dimerization of Caspase-9 molecules, by a cytochrome C and adenosine triphosphate (ATP)-driven interaction with apoptotic protease-activating factor 1 (Apaf-1). Because of the use of a CID to induce dimerization and activation of the suicide switch, the function of the CARD domain is superfluous in this context and removal of the CARD domain was investigated as a method of reducing basal activity. Given that only dimerization rather than multimerization is required for activation of Caspase-9, a single FKBP12v36 domain also was investigated as a method to effect activation.

[0476] The activity of the resultant truncated and/or modified forms of Caspase-9 (e.g., the CARD domain, or one of the 2 FKBP domains, or both, are removed) were compared. A construct with a disrupted activation site, F′F-C-Casp9_{C->S}, provided a nonfunctional control (see FIG. 1A). All constructs were cloned into the retroviral vector MSCV²⁶ in which retroviral long terminal repeats (LTRs) direct transgene expression and enhanced GFP is coexpressed from the same mRNA by use of an internal ribosomal entry site (IRES). In transfected 293T cells, expression of all inducible Caspase-9 constructs at the expected size as well as coexpression of GFP was demonstrated by Western blot (see FIG. 1B). Protein expression (estimated by mean fluorescence of GFP and visualized on Western blot) was highest in the nonfunctional construct F′F-C-Casp9_{C->S} and greatly diminished in the full-length construct F′F-C-Casp9. Removal of the CARD (F′F-Casp9), one FKBP (F-C-Casp9), or both (F-Casp9) resulted in progressively higher expression of both inducible Caspase-9 and GFP, and correspondingly enhanced sensitivity to CID (see FIG. 1A). Based on these results, the F-Casp9 construct (henceforth referred to as iCasp9_{M}) was used for further study in human T lymphocytes.

Stable Expression of iCasp9_{M} in Human T Lymphocytes

[0477] The long-term stability of suicide gene expression is of utmost importance, since suicide genes must be expressed for as long as the genetically engineered cells persist. For T-cell transduction, a FLYRD18-derived retroviral producer clone that produces high-titer RD114-pseudotyped virus was generated to facilitate the transduction of T cells. iCasp9_{M} expression in EBV-specific CTL lines (EBV-CTL) was evaluated since EBV-specific CTL lines have well-characterized function and specificity and are already being used as in vivo therapy for prevention and treatment of EBV-associated malignancies. Consistent transduction efficiencies of EBV-CTLs of more than 70% (mean, 75.3%; range, 71.4%-83.0% in 5 different donors) were obtained after a single transduction with retrovirus. The expression of iCasp9_{M} in EBV-CTLs was stable for at least 4 weeks after transduction without selection or loss of transgene function.

iCasp9_{M} does not Alter Transduced T-Cell Characteristics

[0478] To ensure that expression of iCasp9_{M} did not alter T-cell characteristics, the phenotype, antigen-specificity, proliferative potential, and function of nontransduced or nonfunctional iCasp9_{C->S}-transduced EBV-CTLs was compared with that of iCasp9_{M}-transduced EBV-CTLs. In 4 separate donors, transduced and nontransduced CTLs consisted of equal numbers of CD4+, CD8+, CD56+, and TCR α/β+ cells. Similarly, production of cytokines including IFN-γ, TNFα, IL-10, IL-4, IL-5, and IL-2 was unaltered by iCasp9_{M} expression. iCasp9_{M}-transduced EBV-CTLs specifically lysed autologous LCLs comparable to nontransduced and control-transduced CTLs. Expression of iCasp9M did not affect the growth characteristics of exponentially growing CTLs, and importantly, dependence on antigen and IL-2 for proliferation was preserved. On day 21 after transduction, the normal weekly antigenic stimulation with autologous LCLs and IL-2 was continued or discontinued. Discontinuation of antigen stimulation resulted in a steady decline of T cells.

Elimination of More than 99% of T Lymphocytes Selected for High Transgene Expression In Vitro

[0479] Inducible iCasp9_{M} proficiency in CTLs was tested by monitoring loss of GFP-expressing cells after administration of CID; 91.3% (range, 89.5%-92.6% in 5 different donors) of GFP⁺ cells were eliminated after a single 10-nM dose of CID. Similar results were obtained regardless of exposure time to CID (range, 1 hour-continuous). In all experiments, CTLs that survived CID treatment had low transgene expression with a 70% (range, 55%-82%) reduction in mean fluorescence intensity of GFP after CID. No further elimination of the surviving GFP⁺ T cells could be obtained by an antigenic stimulation followed by a second 10-nM dose of CID. Therefore, the non-responding CTLs most likely expressed insufficient iCasp9_{M} for functional activation by CID. To investigate the correlation between low levels of expression and CTL non-response to CID, CTLs were sorted for low, intermediate, and high expression of the linked marker gene GFP and mixed 1:1 with nontransduced CTLs from the same donor to allow for an accurate quantitation of the number of transduced T cells responding to CID-induced apoptosis.

[0480] The number of transduced T cells eliminated increased with the level of GFP transgene expression (see FIGS. 4A, 4B and 4C). To determine the correlation between transgene expression and function of iCasp9_{M}, iCasp9_{M} IRES.GFP-transduced EBV-CTL were selected for low (mean 21), intermediate (mean 80) and high (mean 189) GFP expression. Selected T-cells were incubated overnight with 10 nM CID and subsequently stained with annexin V and 7-AAD. Indicated are the percentages of annexin V+/7-AAD− and annexin V+/7-AAD+T−. Selected T-cells were mixed 1:1 with non-transduced T-cells and incubated with 10 nM CID following antigenic stimulation. Indicated is the percentage of residual GFP-positive T-cells on day 7.

[0481] For GFP_{high}-selected cells, 10 nM CID led to deletion of 99.1% (range, 98.7%-99.4%) of transduced cells. On the day of antigen stimulation, F-Casp9_{M}.I.GFP-transduced CTLs were either untreated or treated with 10 nM CID. Seven days later, the response to CID was measured by flow cytometry for GFP. The percentage of transduced T cells was adjusted to 50% to allow for an accurate measurement of residual GFP⁺ cells after CID treatment. The responses to CID in unselected (top row of and GFP_{high}-selected CTLs (bottom row of was compared. The percentage of residual GFP⁺ cells is indicated.

[0482] Rapid induction of apoptosis in the GFP_{high}-selected cells is demonstrated by apoptotic characteristics such as cell shrinkage and fragmentation within 14 hours of CID administration. After overnight incubation with 10 nM CID, F-Casp9_{M}.I.GFP_{high}-transduced T cells had apoptotic characteristics such as cell shrinkage and fragmentation by microscopic evaluation. Of the T cells selected for high expression, 64% (range, 59%-69%) had an apoptotic (annexin-V⁺+/7-AAD⁻) and 30% (range, 26%-32%) had a necrotic (annexinV+/7-AAD+) phenotype. Staining with markers of apoptosis showed that 64% of T cells had an apoptotic phenotype (annexin V⁺, 7-AAD⁻, lower right quadrant) and 32% a necrotic phenotype (annexin V⁺, 7-AAD⁺, upper right quadrant). A representative example of 3 separate experiments is shown.

[0483] In contrast, the induction of apoptosis was significantly lower in T cells selected for intermediate or low GFP expression (see FIGS. 4A, 4B and 4C). For clinical applications therefore, versions of the expression constructs with selectable markers that allow selection for high copy number, high levels of expression, or both high copy number and high levels of expression may be desirable. CID-induced apoptosis was inhibited by the panCaspase inhibitor zVAD-fmk (100 μM for 1 hour prior to adding CID. Titration of CID showed that 1 nM CID was sufficient to obtain the maximal deletion effect. A dose-response curve using the indicated amounts of CID (AP20187) shows the sensitivity of F-Casp9_{M}.I.GFP_{high}, to CID. Survival of GFP⁺ cells is measured on day 7 after administration of the indicated amount of CID. The mean and standard deviation for each point are given. Similar results were obtained using another chemical inducer of dimerization (CID), AP1903, which was clinically shown to have substantially no adverse effects when administered to healthy volunteers. The dose response remained unchanged for at least 4 weeks after transduction.

iCasp9_{M} is Functional in Malignant Cells that Express Antiapoptotic Molecules

[0484] Caspase-9 was selected as an inducible proapoptotic molecule for clinical use rather than previously presented iFas and iFADD, because Caspase-9 acts relatively late in apoptosis signaling and therefore is expected to be less susceptible to inhibition by apoptosis inhibitors. Thus, suicide function should be preserved not only in malignant, transformed T-cell lines that express antiapoptotic molecules, but also in subpopulations of normal T cells that express elevated antiapoptotic molecules as part of the process to ensure long-term preservation of memory cells. To further investigate the hypothesis, the function of iCasp9_{M} and iFas was first compared in EBV-CTLs. To eliminate any potential vector based difference, inducible Fas also was expressed in the MSCV.IRES.GFP vector, like iCasp9. For these experiments both ΔNGFR.iFas.I.GFP and iCasp9_{M}.I.GFP-transduced CTLs were sorted for GFP_{high} expression and mixed with nontransduced CTLs at a 1:1 ratio to obtain cell populations that expressed either iFas or iCasp9_{M} at equal proportions and at similar levels. The EBV-CTLs were sorted for high GFP expression and mixed 1:1 with nontransduced CTLs as presented. The percentages of ΔNGFR⁺/GFP⁺ and GFP⁺ T cells are indicated.

[0485] Elimination of GFP⁺ cells after administration of 10 nM CID was more rapid and more efficient in iCasp9_{M} than in iFas-transduced CTLs (99.2%+/−0.14% of iCasp9_{M}-transduced cells compared with 89.3%+/−4.9% of iFas-transduced cells at day 7 after CID; P<0.05). On the day of LCL stimulation, 10 nM CID was administered, and GFP was measured at the time points indicated to determine the response to CID. Black diamonds represent data for ΔNGFR-iFas.I.GFP; black squares represent data for iCasp9_{M}.I.GFP. Mean and standard deviation of 3 experiments are shown.

[0486] The function of iCasp9M and iFas was also compared in 2 malignant T-cell lines: Jurkat, an apoptosis-sensitive T-cell leukemia line, and MT-2, an apoptosis-resistant T-cell line, due to c-FLIP and bcl-xL expression. Jurkat cells and MT-2 cells were transduced with iFas and iCasp9_{M} with similar efficiencies (92% vs 84% in Jurkat, 76% vs 70% in MT-2) and were cultured in the presence of 10 nM CID for 8 hours. Annexin-V staining showed that although iFas and iCasp9_{M} induced apoptosis in an equivalent number of Jurkat cells (56.4%+/−15.6% and 57.2%+1-18.9%, respectively), only activation of iCasp9_{M} resulted in apoptosis of MT-2 cells (19.3%+/−8.4% and 57.9%+/−11.9% for iFas and iCasp9_{M}, respectively; see FIG. 5C).

[0487] The human T-cell lines Jurkat (left) and MT-2 (right) were transduced with ΔNGFR-iFas.I.GFP or iCasp9_{M}.I.GFP. An equal percentage of T cells were transduced with each of the suicide genes: 92% for ΔNGFR-iFas.I.GFP versus 84% for iCasp9_{M}.I.GFP in Jurkat, and 76% for ΔNGFR-iFas.I.GFP versus 70% for iCasp9_{M}.I.GFP in MT-2. T cells were either nontreated or incubated with 10 nM CID. Eight hours after exposure to CID, apoptosis was measured by staining for annexin V and 7-AAD. A representative example of 3 experiments is shown. PE indicates phycoerythrin. These results demonstrate that in T cells overexpressing apoptosis-inhibiting molecules, the function of iFas can be blocked, while iCasp9_{M} can still effectively induce apoptosis.

iCasp9M-Mediated Elimination of T Cells Expressing an Immunomodulatory Transgene

[0488] To determine whether iCasp9M could effectively destroy cells genetically modified to express an active transgene product, the ability of iCasp9_{M} to eliminate EBV-CTLs stably expressing IL-12 was measured. While IL-12 was undetectable in the supernatant of nontransduced and iCasp9_{M}.IRES.GFP-transduced CTLs, the supernatant of iCasp9_{M}.IRES.IL-12-transduced cells contained 324 μg/mL to 762 μg/mL IL-12. After administration of 10 nM CID, however, the IL-12 in the supernatant fell to undetectable levels (<7.8 μg/mL). Thus, even without prior sorting for high transgene expressing cells, activation of iCasp9_{M} is sufficient to completely eliminate all T cells producing biologically relevant levels of IL-12. The marker gene GFP in the iCasp9_{M}.I.GFP constructs was replaced by flexi IL-12, encoding the p40 and p35 subunits of human IL-12. iCasp9_{M}.I.GFP- and iCasp9_{M}.I.IL-12-transduced EBV-CTLs were stimulated with LCLs, and then left untreated or exposed to 10 nM CID. Three days after a second antigenic stimulation, the levels of IL-12 in the culture supernatant were measured by IL-12 ELISA (detection limit of this assay is 7.8 μg/mL). The mean and standard deviation of triplicate wells are indicated. Results of 1 of 2 experiments with CTLs from 2 different donors are shown.

Elimination of More than 99% of T Cells Selected for High Transgene Expression In Vivo

[0489] The function of iCasp9_{M} also was evaluated in transduced EBV-CTLs in vivo. A SCID mouse-human xenograft model was used for adoptive immunotherapy. After intravenous infusion of a 1:1 mixture of nontransduced and iCasp9_{M}.IRES.GFP_{high}-transduced CTLs into SCID mice bearing an autologous LCL xenograft, mice were treated either with a single dose of CID or carrier only. Three days after CID/carrier administration, tumors were analyzed for human CD3⁺/GFP⁺ cells. Detection of the nontransduced component of the infusion product, using human anti-CD3 antibodies, confirmed the success of the tail-vein infusion in mice that received CID. In mice treated with CID, there was more than a 99% reduction in the number of human CD3⁺/GFP⁺ T cells, compared with infused mice treated with carrier alone, demonstrating equally high sensitivity of iCasp9_{M}-transduced T cells in vivo and in vitro.

[0490] The function of iCasp9_{M} in vivo, was assayed. NOD/SCID mice were irradiated and injected subcutaneously with 10×10⁶ to 15×10⁶ LCLs. After 14 days, mice bearing tumors of 0.5 cm in diameter received a total of 15×10⁶ EBV-CTLs (50% of these cells were nontransduced and 50% were transduced with iCasp9_{M}.I.GFP and sorted for high GFP expression). On day 3 after CTL administration, mice received either CID (50 μg AP20187; (black diamonds, n=6) or carrier only (black squares, n=5) and on day 6 the presence of human CD3⁺/GFP⁺ T cells in the tumors was analyzed. Human CD3⁺ T cells isolated from the tumors of a control group of mice that received only nontransduced CTLs (15×10⁶ CTLs; n=4) were used as a negative control for the analysis of CD3⁺/GFP⁺ T cells within the tumors.

### Discussion

[0491] Presented herein are expression vectors expressing suicide genes suitable for eliminating gene-modified T cells in vivo, in some embodiments. Suicide gene expression vectors presented herein have certain non-limiting advantageous features including stable coexpression in all cells carrying the modifying gene, expression at levels high enough to elicit cell death, low basal activity, high specific activity, and minimal susceptibility to endogenous antiapoptotic molecules. Presented herein, in certain embodiments, is an inducible Caspase-9, iCasp9_{M}, which has low basal activity allowing stable expression for more than 4 weeks in human T cells. A single 10-nM dose of a small molecule chemical inducer of dimerization (CID) is sufficient to kill more than 99% of iCasp9_{M}-transduced cells selected for high transgene expression both in vitro and in vivo. Moreover, when coexpressed with Th1 cytokine IL-12, activation of iCasp9_{M} eliminated all detectable IL-12-producing cells, even without selection for high transgene expression. Caspase-9 acts downstream of most antiapoptotic molecules, therefore, a high sensitivity to CID is preserved regardless of the presence of increased levels of antiapoptotic molecules of the bcl-2 family. Thus, iCasp9_{M} also may prove useful for inducing destruction even of transformed T cells and memory T cells that are relatively resistant to apoptosis.

[0492] Unlike other Caspase molecules, proteolysis does not appear sufficient for activation of Caspase-9. Crystallographic and functional data indicate that dimerization of inactive Caspase-9 monomers leads to conformational change-induced activation. The concentration of pro-Caspase-9, in a physiologic setting, is in the range of about 20 nM, well below the threshold needed for dimerization.

[0493] Without being limited by theory, it is believed the energetic barrier to dimerization can be overcome by homophilic interactions between the CARD domains of Apaf-1 and Caspase-9, driven by cytochrome C and ATP. Overexpression of Caspase-9 joined to 2 FKBPs may allow spontaneous dimerization to occur and can account for the observed toxicity of the initial full length Caspase-9 construct. A decrease in toxicity and an increase in gene expression was observed following removal of one FKBP, most likely due to a reduction in toxicity associated with spontaneous dimerization. While multimerization often is involved in activation of surface death receptors, dimerization of Caspase-9 should be sufficient to mediate activation. Data presented herein indicates that iCasp9 constructs with a single FKBP function as effectively as those with 2 FKBPs. Increased sensitivity to CID by removal of the CARD domain may represent a reduction in the energetic threshold of dimerization upon CID binding.

[0494] The persistence and function of virus- or bacteria-derived lethal genes, such as HSV-TK and cytosine deaminase, can be impaired by unwanted immune responses against cells expressing the virus or bacteria derived lethal genes. The FKBPs and proapoptotic molecules that form the components of iCasp9_{M} are human-derived molecules and are therefore less likely to induce an immune response. Although the linker between FKBP and Caspase-9 and the single point mutation in the FKBP domain introduce novel amino acid sequences, the sequences were not immunologically recognized by macaque recipients of iFas-transduced T cells. Additionally, because the components of iCasp9_{M} are human-derived molecules, no memory T cells specific for the junction sequences should be present in a recipient, unlike virus-derived proteins such as HSV-TK, thereby reducing the risk of immune response-mediated elimination of iCasp9_{M}-transduced T cells.

[0495] Previous studies using inducible Fas or the death effector domains (DED) of Fas associated death domain proteins (FADD) showed that approximately 10% of transduced cells were unresponsive to activation of the destructive gene. As observed in experiments presented here, a possible explanation for unresponsiveness to CID is low expression of the transgene. The iCasp9_{M}-transduced T cells in our study and iFas-transduced T cells in studies by others that survived after CID administration had low levels of transgene expression. In an attempt to overcome a perceived retroviral “positional effect”, increased levels of homogeneous expression of the transgene were achieved by flanking retroviral integrants with the chicken beta-globin chromatin insulator. Addition of the chromatin insulator dramatically increased the homogeneity of expression in transduced 293T cells, but had no significant effect in transduced primary T cell. Selection of T cells with high expression levels minimized variability of response to the dimerizer. Over 99% of transduced T cells sorted for high GFP expression were eliminated after a single 10-nM CID dose. This demonstration supports the hypothesis that cells expressing high levels of suicide gene can be isolated using a selectable marker.

[0496] A very small number of resistant residual cells may cause a resurgence of toxicity, a deletion efficiency of up to 2 logs will significantly decrease this possibility. For clinical use, coexpression with a nonimmunogenic selectable marker such as truncated human NGFR, CD20, or CD34 (e.g., instead of GFP) will allow for selection of high transgene-expressing T cells. Coexpression of the suicide switch (e.g., iCASP9_{M}) and a suitable selectable marker (e.g., truncated human NGFR, CD20, CD34, the like and combinations thereof) can be obtained using either an internal ribosome entry site (IRES) or posttranslational modification of a fusion protein containing a self-cleaving sequence (eg, 2A). In contrast, in situations where the sole safety concern is the transgene-mediated toxicity (eg, artificial T-cell receptors, cytokines, the like or combinations thereof), this selection step may be unnecessary, as tight linkage between iCasp9_{M} and transgene expression enables elimination of substantially all cells expressing biologically relevant levels of the therapeutic transgene. This was demonstrated by coexpressing iCasp9_{M} with IL-12. Activation of iCasp9_{M} substantially eliminated any measurable IL-12 production. The success of transgene expression and subsequent activation of the “suicide switch” may depend on the function and the activity of the transgene.

[0497] Another possible explanation for unresponsiveness to CID is that high levels of apoptosis inhibitors may attenuate CID-mediated apoptosis. Examples of apoptosis inhibitors include c-FLIP, bcl-2 family members and inhibitors of apoptosis proteins (IAPs), which normally regulate the balance between apoptosis and survival. For instance, upregulation of c-FLIP and bcl-2 render a subpopulation of T cells, destined to establish the memory pool, resistant to activation-induced cell death in response to cognate target or antigen-presenting cells. In several T-lymphoid tumors, the physiologic balance between apoptosis and survival is disrupted in favor of cell survival. A suicide gene should delete substantially all transduced T cells including memory and malignantly transformed cells. Therefore, the chosen inducible suicide gene should retain a significant portion if not substantially all of its activity in the presence of increased levels of antiapoptotic molecules.

[0498] The apical location of iFas (or iFADD) in the apoptosis signaling pathway may leave it especially vulnerable to inhibitors of apoptosis, thus making these molecules less well suited to being the key component of an apoptotic safety switch. Caspase 3 or 7 would seem well suited as terminal effector molecules; however neither could be expressed at functional levels in primary human T cells. Therefore Caspase-9, was chosen as the suicide gene, because Capsase-9 functions late enough in the apoptosis pathway that it bypasses the inhibitory effects of c-FLIP and antiapoptotic bcl-2 family members, and Caspase-9 also could be expressed stably at functional levels.

[0499] Although X-linked inhibitor of apoptosis (XIAP) could in theory reduce spontaneous Caspase-9 activation, the high affinity of AP20187 (or AP1903) for FKBP_{V36} may displace this noncovalently associated XIAP. In contrast to iFas, iCasp9_{M} remained functional in a transformed T-cell line that overexpresses antiapoptotic molecules, including bcl-xL.

[0500] Presented herein is an inducible safety switch, designed specifically for expression from an oncoretroviral vector by human T cells. iCasp9_{M} can be activated by AP1903 (or analogs), a small chemical inducer of dimerization that has proven safe at the required dose for optimum deletional effect, and unlike ganciclovir or rituximab has no other biologic effects in vivo. Therefore, expression of this suicide gene in T cells for adoptive transfer can increase safety and also may broaden the scope of clinical applications.

### Example 2: Using the iCasp9 Suicide Gene to Improve the Safety of Allodepleted T Cells after Haploidentical Stem Cell Transplantation

[0501] Presented in this example are expression constructs and methods of using the expression constructs to improve the safety of allodepleted T cells after haploidentical stem cell transplantation. A retroviral vector encoding iCasp9 and a selectable marker (truncated CD19) was generated as a safety switch for donor T cells. Even after allodepletion (using anti-CD25 immunotoxin), donor T cells could be efficiently transduced, expanded, and subsequently enriched by CD19 immunomagnetic selection to >90% purity. The engineered cells retained anti-viral specificity and functionality, and contained a subset with regulatory phenotype and function. Activating iCasp9 with a small-molecule dimerizer rapidly produced >90% apoptosis. Although transgene expression was downregulated in quiescent T cells, iCasp9 remained an efficient suicide gene, as expression was rapidly upregulated in activated (alloreactive) T cells.

### Materials and Methods

### Generation of Allodepleted T Cells

[0502] Allodepleted cells were generated from healthy volunteers as previously presented. Briefly, peripheral blood mononuclear cells (PBMCs) from healthy donors were co-cultured with irradiated recipient Epstein Barr virus (EBV)-transformed lymphoblastoid cell lines (LCL) at responder-to-stimulator ratio of 40:1 in serum-free medium (AIM V; Invitrogen, Carlsbad, Calif.). After 72 hours, activated T cells that expressed CD25 were depleted from the co-culture by overnight incubation in RFT5-SMPT-dgA immunotoxin. Allodepletion was considered adequate if the residual CD3⁺CD25⁺ population was <1% and residual proliferation by 3H-thymidine incorporation was <10%.

### Plasmid and Retrovirus

[0503] SFG.iCasp9.2A.CD19 consists of inducible Caspase-9 (iCasp9) linked, via a cleavable 2A-like sequence, to truncated human CD19. iCasp9 consists of a human FK5 06-binding protein (FKBP12; GenBank AH002 818) with an F36V mutation, connected via a Ser-Gly-Gly-Gly-Ser linker (SEQ ID NO: 286) to human Caspase-9 (CASP9; GenBank NM 001229). The F36V mutation increases the binding affinity of FKBP12 to the synthetic homodimerizer, AP20187 or AP1903. The Caspase recruitment domain (CARD) has been deleted from the human Caspase-9 sequence because its physiological function has been replaced by FKBP12, and its removal increases transgene expression and function. The 2A-like sequence encodes an 20 amino acid peptide from Thosea asigna insect virus, which mediates >99% cleavage between a glycine and terminal proline residue, resulting in 19 extra amino acids in the C terminus of iCasp9, and one extra proline residue in the N terminus of CD19. CD19 consists of full-length CD19 (GenBank NM 001770) truncated at amino acid 333 (TDPTRRF (SEQ ID NO: 290)), which shortens the intracytoplasmic domain from 242 to 19 amino acids, and removes all conserved tyrosine residues that are potential sites for phosphorylation.

[0504] A stable PG13 clone producing Gibbon ape leukemia virus (Gal-V) pseudotyped retrovirus was made by transiently transfecting Phoenix Eco cell line (ATCC product #SD3444; ATCC, Manassas, Va.) with SFG.iCasp9.2A.CD19. This produced Eco-pseudotyped retrovirus. The PG13 packaging cell line (ATCC) was transduced three times with Eco-pseudotyped retrovirus to generate a producer line that contained multiple SFG.iCasp9.2A.CD19 proviral integrants per cell. Single cell cloning was performed, and the PG13 clone that produced the highest titer was expanded and used for vector production.

### Retro Viral Transduction

[0505] Culture medium for T cell activation and expansion consisted of 45% RPMI 1640 (Hyclone, Logan, Utah), 45% Clicks (Irvine Scientific, Santa Ana, Calif.) and 10% fetal bovine serum (FBS; Hyclone). Allodepleted cells were activated by immobilized anti-CD3 (OKT3; Ortho Biotech, Bridgewater, N.J.) for 48 hours before transduction with retroviral vector. Selective allodepletion was performed by co-culturing donor PBMC with recipient EBV-LCL to activate alloreactive cells: activated cells expressed CD25 and were subsequently eliminated by anti-CD25 immunotoxin. The allodepleted cells were activated by OKT3 and transduced with the retroviral vector 48 hours later. Immunomagnetic selection was performed on day 4 of transduction; the positive fraction was expanded for a further 4 days and cryopreserved.

[0506] In small-scale experiments, non-tissue culture-treated 24-well plates (Becton Dickinson, San Jose, Calif.) were coated with OKT3 1 g/ml for 2 to 4 hours at 37° C. Allodepleted cells were added at 1×10⁶ cells per well. At 24 hours, 100 U/ml of recombinant human interleukin-2 (IL-2) (Proleukin; Chiron, Emeryville, Calif.) was added. Retroviral transduction was performed 48 hours after activation. Non-tissue culture-treated 24-well plates were coated with 3.5 μg/cm² recombinant fibronectin fragment (CH-296; Retronectin; Takara Mirus Bio, Madison, Wis.) and the wells loaded twice with retroviral vector-containing supernatant at 0.5 ml per well for 30 minutes at 37° C., following which OKT3-activated cells were plated at 5×10⁵ cells per well in fresh retroviral vector-containing supernatant and T cell culture medium at a ratio of 3:1, supplemented with 100 U/ml IL-2. Cells were harvested after 2 to 3 days and expanded in the presence of 50 U/ml IL-2.

### Scaling-Up Production of Gene-Modified Allodepleted Cells

[0507] Scale-up of the transduction process for clinical application used non-tissue culture-treated T75 flasks (Nunc, Rochester, N.Y.), which were coated with 10 ml of OKT3 1 μg/ml or 10 ml of fibronectin 7 μg/ml at 4° C. overnight. Fluorinated ethylene propylene bags corona-treated for increased cell adherence (2PF-0072AC, American Fluoroseal Corporation, Gaithersburg, Md.) were also used. Allodepleted cells were seeded in OKT3-coated flasks at 1×10⁶ cells/ml. 100 U/ml IL-2 was added the next day. For retroviral transduction, retronectin-coated flasks or bags were loaded once with 10 ml of retrovirus-containing supernatant for 2 to 3 hours. OKT3-activated T cells were seeded at 1×10⁶ cells/ml in fresh retroviral vector-containing medium and T cell culture medium at a ratio of 3:1, supplemented with 100 U/ml IL-2. Cells were harvested the following morning and expanded in tissue-culture treated T75 or T175 flasks in culture medium supplemented with between about 50 to 100 U/ml IL-2 at a seeding density of between about 5×10⁵ cells/ml to 8×10⁵ cells/ml.

### CD19 Immunomagnetic Selection

[0508] Immunomagnetic selection for CD19 was performed 4 days after transduction. Cells were labeled with paramagnetic microbeads conjugated to monoclonal mouse anti-human CD19 antibodies (Miltenyi Biotech, Auburn, Calif.) and selected on MS or LS columns in small scale experiments and on a CliniMacs Plus automated selection device in large scale experiments. CD19-selected cells were expanded for a further 4 days and cryopreserved on day 8 post transduction. These cells were referred to as “gene-modified allodepleted cells”.

### Immunophenotyping and Pentamer Analysis

[0509] Flow cytometric analysis (FACSCalibur and CellQuest software; Becton Dickinson) was performed using the following antibodies: CD3, CD4, CD8, CD19, CD25, CD27, CD28, CD45RA, CD45RO, CD56 and CD62L. CD19-PE (Clone 4G7; Becton Dickinson) was found to give optimum staining and was used in all subsequent analysis. A Non-transduced control was used to set the negative gate for CD19. An HLA-pentamer, HLA-B8-RAKFKQLL (SEQ ID NO: 287) (Proimmune, Springfield, Va.) was used to detect T cells recognizing an epitope from EBV lytic antigen (BZLF1). HLA-A2-NLVPMVATV (SEQ ID NO: 288) pentamer was used to detect T cells recognizing an epitope from CMV-pp65 antigen.

### Interferon-ELISpot Assay for Anti-Viral Response

[0510] Interferon-ELISpot for assessment of responses to EBV, CMV and adenovirus antigens was performed using known methods. Gene-modified allodepleted cells cryopreserved at 8 days post-transduction were thawed and rested overnight in complete medium without IL-2 prior to use as responder cells. Cryopreserved PBMCs from the same donor were used as comparators. Responder cells were plated in duplicate or triplicate in serial dilutions of 2×10⁵, 1×10⁵, 5×10⁴ and 2.5×10⁴ cells per well. Stimulator cells were plated at 1×10⁵ per well. For response to EBV, donor-derived EBV-LCLs irradiated at 40Gy were used as stimulators. For response to adenovirus, donor-derived activated monocytes infected with Ad5f35 adenovirus were used.

[0511] Briefly, donor PBMCs were plated in X-Vivo 15 (Cambrex, Walkersville, Md.) in 24-well plates overnight, harvested the next morning, infected with Ad5f35 at a multiplicity of infection (MOI) of 200 for 2 hours, washed, irradiated at 30Gy, and used as stimulators. For anti-CMV response, a similar process using Ad5f35 adenovirus encoding the CMV pp65 transgene (Ad5f35-pp65) at an MOI of 5000 was used. Specific spot-forming units (SFU) were calculated by subtracting SFU from responder-alone and stimulator-alone wells from test wells. Response to CMV was the difference in SFU between Ad5f35-pp65 and Ad5f35 wells.

### EBV-Specific Cytotoxicity

[0512] Gene-modified allodepleted cells were stimulated with 40Gy-irradiated donor-derived EBVLCL at a responder: stimulator ratio of 40:1. After 9 days, the cultures were restimulated at a responder: stimulator ratio of 4:1. Restimulation was performed weekly as indicated. After two or three rounds of stimulation, cytotoxicity was measured in a 4-hour 51 Cr-release assay, using donor EBV-LCL as target cells and donor OKT3 blasts as autologous controls. NK activity was inhibited by adding 30-fold excess of cold K562 cells.

Induction of Apoptosis with Chemical Inducer of Dimerization, AP20187

[0513] Suicide gene functionality was assessed by adding a small molecule synthetic homodimerizer, AP20187 (Ariad Pharmaceuticals; Cambridge, Mass.), at 10 nM final concentration the day following CD19 immunomagnetic selection. Cells were stained with annexin V and 7-amino-actinomycin (7-AAD)(BD Pharmingen) at 24 hours and analyzed by flow cytometry. Cells negative for both annexin V and 7-AAD were considered viable, cells that were annexin V positive were apoptotic, and cells that were both annexin V and 7-AAD positive were necrotic. The percentage killing induced by dimerization was corrected for baseline viability as follows: Percentage killing=100%−(% Viability in AP20187-treated cells÷ % Viability in non-treated cells).

### Assessment of Transgene Expression Following Extended Culture and Reactivation

[0514] Cells were maintained in T cell medium containing 50 U/ml IL-2 until 22 days after transduction. A portion of cells was reactivated on 24-well plates coated with 1 g/ml OKT3 and 1 μg/ml anti-CD28 (Clone CD28.2, BD Pharmingen, San Jose, Calif.) for 48 to 72 hours. CD19 expression and suicide gene function in both reactivated and non-reactivated cells were measured on day 24 or 25 post transduction.

[0515] In some experiments, cells also were cultured for 3 weeks post transduction and stimulated with 30G-irradiated allogeneic PBMC at a responder: stimulator ratio of 1:1. After 4 days of co-culture, a portion of cells was treated with 10 nM AP20187. Killing was measured by annexin V/7-AAD staining at 24 hours, and the effect of dimerizer on bystander virus-specific T cells was assessed by pentamer analysis on AP20187-treated and untreated cells.

### Regulatory T Cells

[0516] CD4, CD25 and Foxp3 expression was analyzed in gene-modified allodepleted cells using flow cytometry. For human Foxp3 staining, the eBioscience (San Diego, Calif.) staining set was used with an appropriate rat IgG2a isotype control. These cells were co-stained with surface CD25-FITC and CD4-PE. Functional analysis was performed by co-culturing CD4⁺25⁺ cells selected after allodepletion and gene modification with carboxyfluorescein diacetate N-succinimidyl ester (CFSE)-labeled autologous PBMC. CD4⁺25⁺ selection was performed by first depleting CD8+cells using anti-CD 8 microbeads (Miltenyi Biotec, Auburn, Calif.), followed by positive selection using anti-CD25 microbeads (Miltenyi Biotec, Auburn, Calif.). CFSE-labeling was performed by incubating autologous PBMC at 2×10⁷/ml in phosphate buffered saline containing 1.5 μM CFSE for 10 minutes. The reaction was stopped by adding an equivalent volume of FBS and incubating for 10 minutes at 37° C. Cells were washed twice before use. CFSE-labeled PBMCs were stimulated with OKT3 500 ng/ml and 40G-irradiated allogeneic PBMC feeders at a PBMC:allogeneic feeder ratio of 5:1. The cells were then cultured with or without an equal number of autologous CD4⁺25⁺ gene-modified allodepleted cells. After 5 days of culture, cell division was analyzed by flow cytometry; CD19 was used to gate out non-CFSE-labeled CD4⁺CD25⁺ gene-modified T cells.

### Statistical Analysis

[0517] Paired, 2-tailed Student's t test was used to determine the statistical significance of differences between samples. All data are represented as mean±1 standard deviation.

### Results

[0518] Selectively allodepleted T cells can be efficiently transduced with iCasp9 and expanded

[0519] Selective allodepletion was performed in accordance with clinical protocol procedures. Briefly, 3/6 to 5/6 HLA-mismatched PBMC and lymphoblastoid cell lines (LCL) were co-cultured. RFT5-SMPT-dgA immunotoxin was applied after 72 hours of co-culture and reliably produced allodepleted cells with <10% residual proliferation (mean 4.5±2.8%; range 0.74 to 9.1%; 10 experiments) and containing <1% residual CD3⁺CD25⁺ cells (mean 0.23±0.20%; range 0.06 to 0.73%; 10 experiments), thereby fulfilling the release criteria for selective allodepletion, and serving as starting materials for subsequent manipulation.

[0520] Allodepleted cells activated on immobilized OKT3 for 48 hours could be efficiently transduced with Gal-V pseudotyped retrovirus vector encoding SFG.iCasp9.2A.CD19. Transduction efficiency assessed by FACS analysis for CD19 expression 2 to 4 days after transduction was about 53%±8%, with comparable results for small-scale (24-well plates) and large-scale (T75 flasks) transduction (about 55±8% versus about 50%±10% in 6 and 4 experiments, respectively). Cell numbers contracted in the first 2 days following OKT3 activation such that only about 61%±12% (range of about 45% to 80%) of allodepleted cells were recovered on the day of transduction. Thereafter, the cells showed significant expansion, with a mean expansion in the range of about 94±46-fold (range of about 40 to about 153) over the subsequent 8 days, resulting in a net 58±33-fold expansion. Cell expansion in both small- and large-scale experiments was similar, with net expansion of about 45±29 fold (range of about 25 to about 90) in 5 small-scale experiments and about 79±34 fold (range of about 50 to about 116) in 3 large-scale experiments.

### ΔCD19 Enables Efficient and Selective Enrichment of Transduced Cells on Immunomagnetic Columns

[0521] The efficiency of suicide gene activation sometimes depends on the functionality of the suicide gene itself, and sometimes on the selection system used to enrich for gene-modified cells. The use of CD19 as a selectable marker was investigated to determine if CD19 selection enabled the selection of gene-modified cells with sufficient purity and yield, and whether selection had any deleterious effects on subsequent cell growth. Small-scale selection was performed according to manufacturer's instruction; however, it was determined that large-scale selection was optimum when 101 of CD19 microbeads was used per 1.3×10⁷ cells. FACS analysis was performed at 24 hours after immunomagnetic selection to minimize interference from anti-CD19 microbeads. The purity of the cells after immunomagnetic selection was consistently greater than 90%: mean percentage of CD19+ cells was in the range of about 98.3%±0.5% (n=5) in small-scale selections and in the range of about 97.4%±0.9% (n=3) in large-scale CliniMacs selections

[0522] The absolute yield of small- and large-scale selections were about 31%±11% and about 28%±6%, respectively; after correction for transduction efficiency. The mean recovery of transduced cells was about 54%±14% in small-scale and about 72%±18% in large-scale selections. The selection process did not have any discernable deleterious effect on subsequent cell expansion. In 4 experiments, the mean cell expansion over 3 days following CD19 immunomagnetic selection was about 3.5 fold for the CD19 positive fraction versus about 4.1 fold for non-selected transduced cells (p=0.34) and about 3.7 fold for non-transduced cells (p=0.75).

### Immunophenotype of Gene-Modified Allodepleted Cells

[0523] The final cell product (gene-modified allodepleted cells that had been cryopreserved 8 days after transduction) was immunophenotyped and was found to contain both CD4 and CD8 cells, with CD8 cells predominant, at 62%±11% CD8⁺ versus 23%±8% CD4⁺, as shown in the table below. NS=not significant, SD=standard deviation.

TABLE 1

| | Unmanipulated | Gene-modified | |
|---|---|---|---|
| | PBMC | allodepleted cells | |
| | (mean % ± SD) | (mean % ± SD) | |
| T cells: Total CD3⁺ | 82 ± 6 | 95 ± 6 | NS |
| CD3⁺ 4⁺ | 54 ± 5 | 23 ± 8 | p < 0.01 |
| CD3⁺ 8⁺ | 26 ± 9 | 62 ± 11 | p < 0.001 |
| NK cells: CD3⁻ 56⁺ | 6 ± 3 | 2 ± 1 | NS |
| Memory phenotype | | | |
| CD45RA⁺ | 66 ± 3 | 10 ± 5 | p < 0.001 |
| CD45RO⁺ | 26 ± 2 | 78 ± 7 | p < 0.001 |
| CD45RA⁻ CD62L⁺ | 19 ± 1 | 24 ± 7 | NS |
| CD45RA⁻ CD62L⁻ | 9 ± 1 | 64 ± 7 | p < 0.001 |
| CD27⁺ CD28⁺ | 67 ± 7 | 19 ± 9 | p < 0.001 |
| CD27⁺ CD28⁻ | 7 ± 3 | 9 ± 4 | NS |
| CD27⁻ CD28⁺ | 4 ± 1 | 19 ± 8 | p < 0.05 |
| CD27⁻ CD28⁻ | 22 ± 8 | 53 ± 18 | p < 0.05 |

[0524] The majorities of cells were CD45RO⁺ and had the surface immunophenotype of effector memory T cells. Expression of memory markers, including CD62L, CD27 and CD28, was heterogeneous. Approximately 24% of cells expressed CD62L, a lymph node-homing molecule predominantly expressed on central memory cells.

### Gene-Modified Allodepleted Cells Retained Antiviral Repertoire and Functionality

[0525] The ability of end-product cells to mediate antiviral immunity was assessed by interferon-ELISpot, cytotoxicity assay, and pentamer analysis. The cryopreserved gene-modified allodepleted cells were used in all analyses, since they were representative of the product currently being evaluated for use in a clinical study. Interferon-γ secretion in response to adenovirus, CMV or EBV antigens presented by donor cells was preserved although there was a trend towards reduced anti-EBV response in gene-modified allodepleted cells versus unmanipulated PBMC. The response to viral antigens was assessed by ELISpot in 4 pairs of unmanipulated PBMC and gene-modified allodepleted cells (GMAC). Adenovirus and CMV antigens were presented by donor-derived activated monocytes through infection with Ad5f35 null vector and Ad5f35-pp65 vector, respectively. EBV antigens were presented by donor EBV-LCL. The number of spot-forming units (SFU) was corrected for stimulator- and responder-alone wells. Only three of four donors were evaluable for CMV response, one seronegative donor was excluded.

[0526] Cytotoxicity was assessed using donor-derived EBV-LCL as targets. Gene-modified allodepleted cells that had undergone 2 or 3 rounds of stimulation with donor-derived EBV-LCL could efficiently lyse virus-infected autologous target cells Gene-modified allodepleted cells were stimulated with donor EBV-LCL for 2 or 3 cycles. ⁵¹Cr release assay was performed using donor-derived EBV-LCL and donor OKT3 blasts as targets. NK activity was blocked with 30-fold excess cold K562. The left panel shows results from 5 independent experiments using totally or partially mismatched donor-recipient pairs. The right panel shows results from 3 experiments using unrelated HLA haploidentical donor-recipient pairs. Error bars indicate standard deviation.

[0527] EBV-LCLs were used as antigen-presenting cells during selective allodepletion, therefore it was possible that EBV-specific T cells could be significantly depleted when the donor and recipient were haploidentical. To investigate this hypothesis, three experiments using unrelated HLA-haploidentical donor-recipient pairs were included, and the results showed that cytotoxicity against donor-derived EBV-LCL was retained. The results were corroborated by pentamer analysis for T cells recognizing HLA-B8-RAKFKQLL (SEQ ID NO: 287), an EBV lytic antigen (BZLF1) epitope, in two informative donors following allodepletion against HLA-B8 negative haploidentical recipients. Unmanipulated PBMC were used as comparators. The RAK-pentamer positive population was retained in gene-modified allodepleted cells and could be expanded following several rounds of in vitro stimulation with donor-derived EBV-LCL. Together, these results indicate that gene-modified allodepleted cells retained significant anti-viral functionality.

### Regulatory T Cells in the Gene-Modified Allodepleted Cell Population

[0528] Flow cytometry and functional analysis were used to determine whether regulatory T cells were retained in our allodepleted, gene modified, T cell product. A Foxp3⁺ CD4⁺25⁺ population was found. Following immunomagnetic separation, the CD4⁺CD25⁺ enriched fraction demonstrated suppressor function when co-cultured with CFSE-labeled autologous PBMC in the presence of OKT3 and allogeneic feeders. Donor-derived PBMC was labeled with CFSE and stimulated with OKT3 and allogeneic feeders. CD4⁺CD25⁺ cells were immunomagnetically selected from the gene-modified cell population and added at 1:1 ratio to test wells. Flow cytometry was performed after 5 days. Gene-modified T cells were gated out by CD19 expression. The addition of CD4⁺CD25⁺ gene-modified cells (bottom panel) significantly reduced cell proliferation. Thus, allodepleted T cells may reacquire regulatory phenotype even after exposure to a CD25 depleting immunotoxin.

Gene-Modified Allodepleted Cells were Efficiently and Rapidly Eliminated by Addition of Chemical Inducer of Dimerization

[0529] The day following immunomagnetic selection, 10 nM of the chemical inducer of dimerization, AP20187, was added to induce apoptosis, which appeared within 24 hours. FACS analysis with annexin V and 7-AAD staining at 24 hours showed that only about 5.5%±2.5% of AP20187-treated cells remained viable, whereas about 81.0%±9.0% of untreated cells were viable. Killing efficiency after correction for baseline viability was about 92.9%±3.8%. Large-scale CD19 selection produced cells that were killed with similar efficiency as small-scale selection: mean viability with and without AP20187, and percentage killing, in large and small scale were about 3.9%, about 84.0%, about 95.4% (n=3) and about 6.6%, about 79.3%, about 91.4% (n=5) respectively. AP20187 was non-toxic to non-transduced cells: viability with and without AP20187 was about 86%±9% and 87%±8% respectively (n=6).

Transgene Expression and Function Decreased with Extended Culture but were Restored Upon Cell Reactivation

[0530] To assess the stability of transgene expression and function, cells were maintained in T cell culture medium and low dose IL-2 (50U/ml) until 24 days after transduction. A portion of cells was then reactivated with OKT3/anti-CD28. CD19 expression was analyzed by flow cytometry 48 to 72 hours later, and suicide gene function was assessed by treatment with 10 nM AP20187. The obtained are for cells from day 5 post transduction (ie, 1 day after CD 19 selection) and day 24 post transduction, with or without 48-72 hours of reactivation (5 experiments). In 2 experiments, CD25 selection was performed after OKT3/aCD28 activation to further enrich activated cells. Error bars represent standard deviation. * indicates p<0.05 when compared to cells from day 5 post transduction. By day 24, surface CD19 expression fell from about 98%±1% to about 88%±4% (p<0.05) with a parallel decrease in mean fluorescence intensity (MFI) from 793±128 to 478±107 (p<0.05) (see FIG. 13B). Similarly, there was a significant reduction in suicide gene function: residual viability was 19.6±5.6% following treatment with AP20187; after correction for baseline viability of 54.8±20.9%, this equated to killing efficiency of only 63.1±6.2%.

[0531] To determine whether the decrease in transgene expression with time was due to reduced transcription following T cell quiescence or to elimination of transduced cells, a portion of cells were reactivated on day 22 post transduction with OKT3 and anti-CD28 antibody. At 48 to 72 hours (day 24 or 25 post transduction), OKT3/aCD28-reactivated cells had significantly higher transgene expression than non-reactivated cells. CD19 expression increased from about 88%±4% to about 93%±4% (p<0.01) and CD19 MFI increased from 478±107 to 643±174 (p<0.01). Additionally, suicide gene function also increased significantly from about a 63.1%±6.2% killing efficiency to about a 84.6%±8.0% (p<0.01) killing efficiency. Furthermore, killing efficiency was completely restored if the cells were immunomagnetically sorted for the activation marker CD25: killing efficiency of CD25 positive cells was about 93%.2±1.2%, which was the same as killing efficiency on day 5 post transduction (93.1±3.5%). Killing of the CD25 negative fraction was 78.6±9.1%.

[0532] An observation of note was that many virus-specific T cells were spared when dimerizer was used to deplete gene-modified cells that have been re-activated with allogeneic PBMC, rather than by non-specific mitogenic stimuli. After 4 days reactivation with allogeneic cells, as shown in FIGS. 14A and 14B, treatment with AP20187 spares (and thereby enriches) viral reactive subpopulations, as measured by the proportion of T cells reactive with HLA pentamers specific for peptides derived from EBV and CMV. Gene-modified allodepleted cells were maintained in culture for 3 weeks post-transduction to allow transgene down-modulation. Cells were stimulated with allogeneic PBMC for 4 days, following which a portion was treated with 10 nM AP20187. The frequency of EBV-specific T cells and CMV-specific T cells were quantified by pentamer analysis before allostimulation, after allostimulation, and after treatment of allostimulated cells with dimerizer. The percentage of virus-specific T cells decreased after allostimulation. Following treatment with dimerizer, virus-specific T cells were partially and preferentially retained.

### Discussion

[0533] The feasibility of engineering allogeneic T cells with two distinct safety mechanisms, selective allodepletion and suicide gene-modification has been demonstrated herein. In combination, these modifications can enhance and/or enable addback of substantial numbers of T cells with anti-viral and anti-tumor activity, even after haploidentical transplantation. The data presented herein show that the suicide gene, iCasp9, functions efficiently (>90% apoptosis after treatment with dimerizer) and that down-modulation of transgene expression that occurred with time was rapidly reversed upon T cell activation, as would occur when alloreactive T cells encountered their targets. Data presented herein also show that CD19 is a suitable selectable marker that enabled efficient and selective enrichment of transduced cells to >90% purity. Furthermore, the data presented herein indicate that these manipulations had no discernable effects on the immunological competence of the engineered T cells with retention of antiviral activity, and regeneration of a CD4⁺CD25⁺ Foxp3⁺ population with Treg activity.

[0534] Given that the overall functionality of suicide genes depends on both the suicide gene itself and the marker used to select the transduced cells, translation into clinical use requires optimization of both components, and of the method used to couple expression of the two genes. The two most widely used selectable markers, currently in clinical practice, each have drawbacks. Neomycin phosphotransferase (neo) encodes a potentially immunogenic foreign protein and requires a 7-day culture in selection medium, which not only increases the complexity of the system, but is also potentially damaging to virus-specific T cells. A widely used surface selection marker, LNGFR, has recently had concerns raised, regarding its oncogenic potential and potential correlation with leukemia, in a mouse model, despite its apparent clinical safety. Furthermore, LNGFR selection is not widely available, because it is used almost exclusively in gene therapy. A number of alternative selectable markers have been suggested. CD34 has been well-studied in vitro, but the steps required to optimize a system configured primarily for selection of rare hematopoietic progenitors, and more critically, the potential for altered in vivo T cell homing, make CD34 sub-optimal for use as a selectable marker for a suicide switch expression construct. CD19 was chosen as an alternative selectable marker, since clinical grade CD19 selection is readily available as a method for B-cell depletion of stem cell autografts. The results presented herein demonstrated that CD19 enrichment could be performed with high purity and yield and, furthermore, the selection process had no discernable effect on subsequent cell growth and functionality.

[0535] The effectiveness of suicide gene activation in CD19-selected iCasp9 cells compared very favorably to that of neo- or LNGFR-selected cells transduced to express the HSVtk gene. The earlier generations of HSVtk constructs provided 80-90% suppression of ³H-thymidine uptake and showed similar reduction in killing efficiency upon extended in vitro culture, but were nonetheless clinically efficacious. Complete resolution of both acute and chronic GVHD has been reported with as little as 80% in vivo reduction in circulating gene-modified cells. These data support the hypothesis that transgene down-modulation seen in vitro is unlikely to be an issue because activated T cells responsible for GVHD will upregulate suicide gene expression and will therefore be selectively eliminated in vivo. Whether this effect is sufficient to allow retention of virus- and leukemia-specific T cells in vivo will be tested in a clinical setting. By combining in vitro selective allodepletion prior to suicide gene modification, the need to activate the suicide gene mechanism may be significantly reduced, thereby maximizing the benefits of addback T cell based therapies.

[0536] The high efficiency of iCasp9-mediated suicide seen in vitro has been replicated in vivo. In a SCID mouse-human xenograft model, more than 99% of iCasp9-modified T cells were eliminated after a single dose of dimerizer. AP1903, which has extremely close functional and chemical equivalence to AP20187, and currently is proposed for use in a clinical application, has been safety tested on healthy human volunteers and shown to be safe. Maximal plasma level of between about 10 ng/ml to about 1275 ng/ml AP1903 (equivalent to between about 7 nM to about 892 nM) was attained over a 0.01 mg/kg to 1.0 mg/kg dose range administered as a 2-hour intravenous infusion. There were substantially no significant adverse effects. After allowing for rapid plasma redistribution, the concentration of dimerizer used in vitro remains readily achievable in vivo.

[0537] Optimal culture conditions for maintaining the immunological competence of suicide gene-modified T cells must be determined and defined for each combination of safety switch, selectable marker and cell type, since phenotype, repertoire and functionality can all be affected by the stimulation used for polyclonal T cell activation, the method for selection of transduced cells, and duration of culture. The addition of CD28 co-stimulation and the use of cell-sized paramagnetic beads to generate gene modified-cells that more closely resemble unmanipulated PBMC in terms of CD4:CD8 ratio, and expression of memory subset markers including lymph node homing molecules CD62L and CCR7, may improve the in vivo functionality of gene-modified T cells. CD28 co-stimulation also may increase the efficiency of retroviral transduction and expansion. Interestingly however, the addition of CD28 co-stimulation was found to have no impact on transduction of allodepleted cells, and the degree of cell expansion demonstrated was higher when compared to the anti-CD3 alone arm in other studies. Furthermore, iCasp9-modified allodepleted cells retained significant anti-viral functionality, and approximately one fourth retained CD62L expression. Regeneration of CD4⁺CD25⁺ Foxp3⁺ regulatory T cells was also seen. The allodepleted cells used as the starting material for T cell activation and transduction may have been less sensitive to the addition of anti-CD28 antibody as co-stimulation. CD25-depleted PBMC/EBV-LCL co-cultures contained T cells and B cells that already express CD86 at significantly higher level than unmanipulated PBMCs and may they provide co-stimulation. Depletion of CD25⁺ regulatory T cells prior to polyclonal T cell activation with anti-CD3 has been reported to enhance the immunological competence of the final T cell product. In order to minimize the effect of in vitro culture and expansion on functional competence, a relatively brief culture period was used in some experiments presented herein, whereby cells were expanded for a total of 8 days post-transduction with CD19-selection being performed on day 4.

[0538] Finally, scaled up production was demonstrated such that sufficient cell product can be produced to treat adult patients at doses of up to 10⁷ cells/kg: allodepleted cells can be activated and transduced at 4×10⁷ cells per flask, and a minimum of 8-fold return of CD19-selected final cell product can be obtained on day 8 post-transduction, to produce at least 3×10⁸ allodepleted gene-modified cells per original flask. The increased culture volume is readily accommodated in additional flasks or bags.

[0539] The allodepletion and iCasp9-modification presented herein may significantly improve the safety of adding back T cells, particularly after haploidentical stem cell allografts. This should in turn enable greater dose-escalation, with a higher chance of producing an anti-leukemia effect.

### Example 3: CASPALLO—Phase 1 Clinical Trial of Allodepleted T Cells Transduced with Inducible Caspase-9 Suicide Gene after Haploidentical Stem Cell Transplantation

[0540] This example presents results of a phase 1 clinical trial using the alternative suicide gene strategy illustrated in FIG. 2. Briefly, donor peripheral blood mononuclear cells were co-cultured with recipient irradiated EBV-transformed lymphoblastoid cells (40:1) for 72 hrs, allodepleted with a CD25 immunotoxin and then transduced with a retroviral supernatant carrying the iCasp9 suicide gene and a selection marker (ΔCD19); ΔCD19 allowed enrichment to >90% purity via immunomagnetic selection.

### An Example of a Protocol for Generation of a Cell Therapy Product is Provided Herein.

### Source Material

[0541] Up to 240 ml (in 2 collections) of peripheral blood was obtained from the transplant donor according to established protocols. In some cases, dependent on the size of donor and recipient, a leukopheresis was performed to isolate sufficient T cells. 10 cc-30 cc of blood also was drawn from the recipient and was used to generate the Epstein Barr virus (EBV)-transformed lymphoblastoid cell line used as stimulator cells. In some cases, dependent on the medical history and/or indication of a low B cell count, the LCLs were generated using appropriate 1st degree relative (e.g., parent, sibling, or offspring) peripheral blood mononuclear cells.

### Generation of Allodepleted Cells

[0542] Allodepleted cells were generated from the transplant donors as presented herein. Peripheral blood mononuclear cells (PBMCs) from healthy donors were co-cultured with irradiated recipient Epstein Barr virus (EBV)-transformed lymphoblastoid cell lines (LCL) at responder-to-stimulator ratio of 40:1 in serum-free medium (AIM V; Invitrogen, Carlsbad, Calif.). After 72 hours, activated T cells that express CD25 were depleted from the co-culture by overnight incubation in RFT5-SMPT-dgA immunotoxin. Allodepletion is considered adequate if the residual CD3⁺CD25⁺ population was <1% and residual proliferation by ³H-thymidine incorporation was <10%.

### Retroviral Production

[0543] A retroviral producer line clone was generated for the iCasp9-CD19 construct. A master cell-bank of the producer also was generated. Testing of the master-cell bank was performed to exclude generation of replication competent retrovirus and infection by Mycoplasma, HIV, HBV, HCV and the like. The producer line was grown to confluency, supernatant harvested, filtered, aliquoted and rapidly frozen and stored at −80° C. Additional testing was performed on all batches of retroviral supernatant to exclude Replication Competent Retrovirus (RCR) and issued with a certificate of analysis, as per protocol.

### Transduction of Allodepleted Cells

[0544] Allodepleted T-lymphocytes were transduced using Fibronectin. Plates or bags were coated with recombinant Fibronectin fragment CH-296 (Retronectin™, Takara Shuzo, Otsu, Japan). Virus was attached to retronectin by incubating producer supernatant in coated plates or bags. Cells were then transferred to virus coated plates or bags. After transduction allodepleted T cells were expanded, feeding them with IL-2 twice a week to reach the sufficient number of cells as per protocol.

### CD19 Immunomagnetic Selection

[0545] Immunomagnetic selection for CD19 was performed 4 days after transduction. Cells are labeled with paramagnetic microbeads conjugated to monoclonal mouse anti-human CD19 antibodies (Miltenyi Biotech, Auburn, Calif.) and selected on a CliniMacs Plus automated selection device. Depending upon the number of cells required for clinical infusion cells were either cryopreserved after the CliniMacs selection or further expanded with IL-2 and cryopreserved on day 6 or day 8 post transduction.

### Freezing

[0546] Aliquots of cells were removed for testing of transduction efficiency, identity, phenotype and microbiological culture as required for final release testing by the FDA. The cells were cryopreserved prior to administration according to protocol.

### Study Drugs

### RFT5-SMPT-dgA

[0547] RFT5-SMPT-dgA is a murine IgG1 anti-CD25 (IL-2 receptor alpha chain) conjugated via a hetero-bifunctional crosslinker [N-succinimidyloxycarbonyl-alpha-methyl-d-(2-pyridylthio) toluene] (SMPT) to chemically deglycosylated ricin A chain (dgA). RFT5-SMPT-dgA is formulated as a sterile solution at 0.5 mg/ml.

### Synthetic Homodimerizer, AP1903

[0548] Mechanism of Action: AP1903-inducible cell death is achieved by expressing a chimeric protein comprising the intracellular portion of the human (Caspase-9 protein) receptor, which signals apoptotic cell death, fused to a drug-binding domain derived from human FK506-binding protein (FKBP). This chimeric protein remains quiescent inside cells until administration of AP1903, which cross-links the FKBP domains, initiating Caspase signaling and apoptosis.

[0549] Toxicology: AP1903 has been evaluated as an Investigational New Drug (IND) by the FDA and has successfully completed a phase 1 clinical safety study. No significant adverse effects were noted when API 903 was administered over a 0.01 mg/kg to 1.0 mglkg dose range.

[0550] Pharmacology/Pharmacokinetics: Patients received 0.4 mg/kg of AP1903 as a 2 h infusion—based on published Pk data which show plasma concentrations of 10 ng/mL -1275 ng/mL over the 0.01 mg/kg to 1.0 mg/kg dose range with plasma levels falling to 18% and 7% of maximum at 0.5 and 2 hrs post dose.

[0551] Side Effect Profile in Humans: No serious adverse events occurred during the Phase 1 study in volunteers. The incidence of adverse events was very low following each treatment, with all adverse events being mild in severity. Only one adverse event was considered possibly related to AP1903. This was an episode of vasodilatation, presented as “facial flushing” for 1 volunteer at the 1.0 mg/kg AP1903 dosage. This event occurred at 3 minutes after the start of infusion and resolved after 32 minutes duration. All other adverse events reported during the study were considered by the investigator to be unrelated or to have improbable relationship to the study drug. These events included chest pain, flu syndrome, halitosis, headache, injection site pain, vasodilatation, increased cough, rhinitis, rash, gum hemorrhage, and ecchymosis.

[0552] Patients developing grade 1 GVHD were treated with 0.4 mg/kg AP1903 as a 2-hour infusion. Protocols for administration of AP1903 to patients grade 1 GVHD were established as follows. Patients developing GvHD after infusion of allodepleted T cells are biopsied to confirm the diagnosis and receive 0.4 mg/kg of AP1903 as a 2 h infusion. Patients with Grade I GVHD received no other therapy initially, however if they showed progression of GvHD conventional GvHD therapy was administered as per institutional guidelines. Patients developing grades 2-4 GVHD were administered standard systemic immunosuppressive therapy per institutional guidelines, in addition to the AP1903 dimerizer drug.

[0553] Instructions for preparation and infusion: AP1903 for injection is obtained as a concentrated solution of 2.33 ml in a 3-ml vial, at a concentration of 5 mg/ml, (i.e., 11.66 mg per vial). AP1903 may also be provided, for example, at 8 ml per vial, at 5 mg/ml. Prior to administration, the calculated dose was diluted to 100 mL in 0.9% normal saline for infusion. AP1903 for injection (0.4 mg/kg) in a volume of 100 ml was administered via IV infusion over 2 hours, using a non-DEHP, non-ethylene oxide sterilized infusion set and infusion pump.

[0554] The iCasp9 suicide gene expression construct (e.g., SFG.iCasp9.2A.ΔCD19), shown in FIG. 24 consists of inducible Caspase-9 (iCasp9) linked, via a cleavable 2A-like sequence, to truncated human CD19 (ΔCD19). iCasp9 includes a human FK506-binding protein (FKBP12; GenBank AH002 818) with an F36V mutation, connected via a Ser-Gly-Gly-Gly-Ser-Gly linker (SEQ ID NO: 289) to human Caspase-9 (CASP9; GenBank NM 001229). The F36V mutation may increase the binding affinity of FKBP12 to the synthetic homodimerizer, AP20187 or AP1903. The Caspase recruitment domain (CARD) has been deleted from the human Caspase-9 sequence and its physiological function has been replaced by FKBP12. The replacement of CARD with FKBP12 increases transgene expression and function. The 2A-like sequence encodes an 18 amino acid peptide from Thosea Asigna insect virus, which mediates >99% cleavage between a glycine and terminal proline residue, resulting in 17 extra amino acids in the C terminus of iCasp9, and one extra proline residue in the N terminus of CD19. ΔCD19 consists of full length CD19 (GenBank NM 001770) truncated at amino acid 333 (TDPTRRF (SEQ ID NO: 290)), which shortens the intracytoplasmic domain from 242 to 19 amino acids, and removes all conserved tyrosine residues that are potential sites for phosphorylation.

### In Vivo Studies

[0555] Three patients received iCasp9⁺ T cells after haplo-CD34⁺ stem cell transplantation (SCT), at dose levels between about 1×10⁶ to about 3×10⁶ cells/kg.

TABLE 2
Characteristics of the patients and clinical outcome.

| | | | | Days from | Number | | |
|---|---|---|---|---|---|---|---|
| | | | Disease | SCT to | of cells | | |
| | Sex | | status at | T-cell | infused | Acute | Clinical |
| Patient # | (age (yr)) | Diagnosis | SCT | infusion | per kg | GvHD | outcome |
| P1 | M(3) | MDS/AML | CR2 | 63 | 1 × 10⁶ | Grade1/2 | Alive in |
| | | | | | | (skin, liver) | CR > 12 |
| | | | | | | | months |
| | | | | | | | No GvHD |
| P2 | F(17) | B-ALL | CR2 | 80 and | (1 × 10⁶)2 | Grade 1 | Alive in |
| | | | | 112 | | (skin) | CR > 12 |
| | | | | | | | months |
| | | | | | | | No GvHD |
| P3 | M(8) | T-ALL | PIF/CR1 | 93 | 3 × 10⁶ | None | Alive in |
| | | | | | | | CR > 12 |
| | | | | | | | No GvHD |
| P4 | F(4) | T-ALL | Active | 30 | 3 × 10⁶ | Grade 1 | Alive in |
| | | | disease | | | (skin) | CR > 12 |
| | | | | | | | No GvHD |

[0556] Infused T cells were detected in vivo by flow cytometry (CD3⁺ ΔCD19⁺) or qPCR as early as day 7 after infusion, with a maximum fold expansion of 170±5 (day 29±9 after infusion), as illustrated in FIGS. 27, 28, and 29. Two patients developed grade I/II aGVHD (see FIGS. 31-32) and AP1903 administration caused >90% ablation of CD3⁺ΔCD19⁺ cells, within 30 minutes of infusion (see FIGS. 30, 33, and 34), with a further log reduction within 24 hours, and resolution of skin and liver aGvHD within 24 hrs, showing that iCasp9 transgene was functional in vivo. For patient two, the disappearance of skin rash within 24 hours post treatment was observed.

TABLE 3
Patients with GvHD (dose level 1)

| | SCT to GvHD | T cells to GvHD | GvHD |
|---|---|---|---|
| Patient | (days) | (days) | (grade/site) |
| 1 | 77 | 14 | 2 (liver, skin) |
| 2 | 124 | 45/13 | 2 (skin) |

[0557] Ex vivo experiments confirmed this data. Furthermore, the residual allodepleted T cells were able to expand and were reactive to viruses (CMV) and fungi (Aspergillus fumigatus) (IFN-γ production). These in vivo studies found that a single dose of dimerizer drug can reduce or eliminate the subpopulation of T cells causing GvHD, but can spare virus specific CTLs, which can then re-expand.

### Immune Reconstitution

[0558] Depending on availability of patient cells and reagents, immune reconstitution studies (Immunophenotyping, T and B cell function) may be obtained at serial intervals after transplant. Several parameters measuring immune reconstitution resulting from iCaspase transduced allodepleted T cells will be analyzed. The analysis includes repeated measurements of total lymphocyte counts, T and CD19 B cell numbers, and FACS analysis of T cell subsets (CD3, CD4, CD8, CD16, CD19, CD27, CD28, CD44, CD62L, CCR7, CD56, CD45RA, CD45RO, alpha/beta and gamma/delta T cell receptors). Depending on the availability of a patient's T cells, T regulatory cell markers such as CD41, CD251, and FoxP3 also are analyzed. Approximately 10-60 ml of patient blood is taken, when possible, 4 hours after infusion, weekly for 1 month, monthly x 9 months, and then at 1 and 2 years. The amount of blood taken is dependent on the size of the recipient and does not exceed 1-2 cc/kg in total (allowing for blood taken for clinical care and study evaluation) at any one blood draw.

### Persistence and Safety of Transduced Allodepleted T Cells

[0559] The following analysis was also performed on the peripheral blood samples to monitor function, persistence and safety of transduced T-cells at time-points indicated in the study calendar:

Phenotype by flow cytometry to detect the presence of transgenic cells.
RCR testing by PCR.
Quantitative real-time PCR for detecting retroviral integrants.

[0560] RCR testing by PCR is performed pre study, at 3, 6, and 12 months, and then yearly for a total of 15 years. Tissue, cell, and serum samples are archived for use in future studies for RCR as required by the FDA.

### Statistical Analysis and Stopping Rules.

[0561] The MTD is defined to be the dose which causes grade III/IV acute GVHD in at most 25% of eligible cases. The determination is based on a modified continual reassessment method (CRM) using a logistic model with a cohort of size 2. Three dose groups are being evaluated namely, 1×10⁶, 3×10⁶, 1×10⁷ with prior probabilities of toxicity estimated at 10%, 15%, and 30%, respectively. The proposed CRM design employs modifications to the original CRM by accruing more than one subject in each cohort, limiting dose escalation to no more than one dose level, and starting patient enrollment at the lowest dose level shown to be safe for non-transduced cells. Toxicity outcome in the lowest dose cohort is used to update the dose-toxicity curve. The next patient cohort is assigned to the dose level with an associated probability of toxicity closest to the target probability of 25%. This process continues until at least 10 patients have been accrued into this dose-escalation study. Depending on patient availability, at most 18 patients may be enrolled into the Phase 1 trial or until 6 patients have been treated at the current MTD. The final MTD will be the dose with probability closest to the target toxicity rate at these termination points.

[0562] Simulations were performed to determine the operating characteristics of the proposed design and compared this with a standard 3+3 dose-escalation design. The proposed design delivers better estimates of the MTD based on a higher probability of declaring the appropriate dose level as the MTD, afforded smaller number of patients accrued at lower and likely ineffective dose levels, and maintained a lower average total number of patients required for the trial. A shallow dose-toxicity curve is expected over the range of doses proposed herein and therefore accelerated dose-escalations can be conducted without comprising patient safety. The simulations performed indicate that the modified CRM design does not incur a larger average number of total toxicities when compared to the standard design (total toxicities equal to 1.9 and 2.1, respectively.).

[0563] Grade III/IV GVHD that occurs within 45 days after initial infusion of allodepleted T cells will be factored into the CRM calculations to determine the recommended dose for the subsequent cohort. Real-time monitoring of patient toxicity outcome is performed during the study in order to implement estimation of the dose-toxicity curve and determine dose level for the next patient cohort using one of the pre-specified dose levels.

### Treatment Limiting Toxicities Will Include:

[0564] grade 4 reactions related to infusion,
graft failure (defined as a subsequent decline in the ANC to <500/mm³ for three consecutive measurements on different days, unresponsive to growth factor therapy that persists for at least 14 days.) occurring within 30 days after infusion of TC-T
grade 4 nonhematologic and noninfectious adverse events, occurring within 30 days after infusion
grades 3-4 acute GVHD by 45 days after infusion of TC-T
treatment-related death occurring within 30 days after infusion

[0565] GVHD rates are summarized using descriptive statistics along with other measures of safety and toxicity. Likewise, descriptive statistics will be calculated to summarize the clinical and biologic response in patients who receive AP1903 due to great than Grade 1 GVHD.

[0566] Several parameters measuring immune reconstitution resulting from iCaspase transduced allodepleted T cells will be analyzed. These include repeated measurements of total lymphocyte counts, T and CD19 B cell numbers, and FACS analysis of T cell subsets (CD3, CD4, CDS, CD16, CD19, CD27, CD44, CD62L, CCR7, CD56, CD45RA, CD45RO, alpha/beta and gamma/delta T cell receptors). If sufficient T cells remain for analysis, T regulatory cell markers such as CD4/CD25/FoxP3 will also be analyzed. Each subject will be measured pre-infusion and at multiple time points post-infusion as presented above.

[0567] Descriptive summaries of these parameters in the overall patient group and by dose group as well as by time of measurement will be presented. Growth curves representing measurements over time within a patient will be generated to visualize general patterns of immune reconstitution. The proportion of iCasp9 positive cells will also be summarized at each time point. Pairwise comparisons of changes in these endpoints over time compared to pre-infusion will be implemented using paired t-tests or Wilcoxon signed-ranks test.

[0568] Longitudinal analysis of each repeatedly-measured immune reconstitution parameter using the random coefficients model will be performed. Longitudinal analysis allows construction of model patterns of immune reconstitution per patient while allowing for varying intercepts and slopes within a patient. Dose level as an independent variable in the model to account for the different dose levels received by the patients will also be used. Testing whether there is a significant improvement in immune function over time and estimates of the magnitude of these improvements based on estimates of slopes and its standard error will be possible using the model presented herein. Evaluation of any indication of differences in rates of immune reconstitution across different dose levels of CTLs will also be performed. The normal distribution with an identity link will be utilized in these models and implemented using SAS MIXED procedure. The normality assumption of the immune reconstitution parameters will be assessed and transformations (e.g. log, square root) can be performed, if necessary to achieve normality.

[0569] A strategy similar to the one presented above can be employed to assess kinetics of T cell survival, expansion and persistence. The ratio of the absolute T cell numbers with the number of marker gene positive cells will be determined and modeled longitudinally over time. A positive estimate of the slope will indicate increasing contribution of T cells for immune recovery. Virus-specific immunity of the iCasp9 T cells will be evaluated by analysis of the number of T cells releasing IFN gamma based on ex-vivo stimulation virus-specific CTLs using longitudinal models. Separate models will be generated for analysis of EBV, CMV and adenovirus evaluations of immunity.

[0570] Finally, overall and disease-free survival in the entire patient cohort will be summarized using the Kaplan-Meier product-limit method. The proportion of patients surviving and who are disease-free at 100 days and 1 year post-transplant can be estimated from the Kaplan-Meier curves.

[0571] In conclusion, addback of iCasp9⁺ allodepleted T cells after haplo CD34⁺ SCT allows a significant expansion of functional donor lymphocytes in vivo and a rapid clearance of alloreactive T cells with resolution of aGvHD.

### Example 4: In Vivo T Cell Allodepletion

[0572] The protocols provided in Examples 1-3 may also be modified to provide for in vivo T cell allodepletion. To extend the approach to a larger group of subjects who might benefit from immune reconstitution without acute GvHD, the protocol may be simplified, by providing for an in vivo method of T cell depletion. In the pre-treatment allodepletion method, as discussed herein, EBV-transformed lymphoblastoid cell lines are first prepared from the recipient, which then act as alloantigen presenting cells. This procedure can take up to 8 weeks, and may fail in extensively pre-treated subjects with malignancy, particularly if they have received rituximab as a component of their initial therapy. Subsequently, the donor T cells are co-cultured with recipient EBV-LCL, and the alloreactive T cells (which express the activation antigen CD25) are then treated with CD25-ricin conjugated monoclonal antibody. This procedure may take many additional days of laboratory work for each subject.

[0573] The process may be simplified by using an in vivo method of allodepletion, building on the observed rapid in vivo depletion of alloreactive T cells by dimerizer drug and the sparing of unstimulated but virus/fungus reactive T cells.

[0574] If there is development of Grade I or greater acute GvHD, a single dose of dimerizer drug is administered, for example at a dose of 0.4 mg/kg of AP1903 as a 2-hour intravenous infusion. Up to 3 additional doses of dimerizer drug may be administered at 48 hour intervals if acute GvHD persists. In subjects with Grade II or greater acute GvHD, these additional doses of dimerizer drug may be combined with steroids. For patients with persistent GVHD who cannot receive additional doses of the dimerizer due to a Grade III or IV reaction to the dimerizer, the patient may be treated with steroids alone, after either 0 or 1 doses of the dimerizer.

### Generation of Therapeutic T Cells

[0575] Up to 240 ml (in 2 collections) of peripheral blood is obtained from the transplant donor according to the procurement consent. If necessary, a leukapheresis is used to obtain sufficient T cells; (either prior to stem cell mobilization or seven days after the last dose of G-CSF). An extra 10-30 mls of blood may also be collected to test for infectious diseases such as hepatitis and HIV.

[0576] Peripheral blood mononuclear cells are be activated using anti-human CD3 antibody (e.g. from Orthotech or Miltenyi) on day 0 and expanded in the presence of recombinant human interleukin-2 (rhIL-2) on day 2. CD3 antibody-activated T cells are transduced by the iCaspase-9 retroviral vector on flasks or plates coated with recombinant Fibronectin fragment CH-296 (Retronectin™, Takara Shuzo, Otsu, Japan). Virus is attached to retronectin by incubating producer supernatant in retronectin coated plates or flasks. Cells are then transferred to virus coated tissue culture devices. After transduction T cells are expanded by feeding them with rhIL-2 twice a week to reach the sufficient number of cells as per protocol.

[0577] To ensure that the majority of infused T cells carry the suicide gene, a selectable marker, truncated human CD19 (ΔCD19) and a commercial selection device, may be used to select the transduced cells to >90% purity. Immunomagnetic selection for CD19 may be performed 4 days after transduction. Cells are labeled with paramagnetic microbeads conjugated to monoclonal mouse anti-human CD19 antibodies (Miltenyi Biotech, Auburn, Calif.) and selected on a CliniMacs Plus automated selection device. Depending upon the number of cells required for clinical infusion cells might either be cryopreserved after the CliniMacs selection or further expanded with IL-2 and cryopreserved as soon as sufficient cells have expanded (up to day 14 from product initiation).

[0578] Aliquots of cells may be removed for testing of transduction efficiency, identity, phenotype, autonomous growth and microbiological examination as required for final release testing by the FDA. The cells are cryopreserved prior to administration.

### Administration of T Cells

[0579] The transduced T cells are administered to patients from, for example, between 30 and 120 days following stem cell transplantation. The cryopreserved T cells are thawed and infused through a catheter line with normal saline. For children, premedications are dosed by weight. Doses of cells may range from, for example, from about 1×10⁴ cells/kg to 1×10⁸ cells/kg, for example from about 1×10⁵ cells/kg to 1×10⁷ cells/kg, from about 1×10⁶ cells/kg to 5×10⁶ cells/kg, from about 1×10⁴ cells/kg to 5×10⁶ cells/kg, for example, about 1×10⁴, about 1×10⁵, about 2×10⁵, about 3×10⁵, about 5×10⁵, 6×10⁵, about 7×10⁵, about 8×10⁵, about 9×10⁵, about 1×10⁶, about 2×10⁶, about 3×10⁶, about 4×10⁶, or about 5×10⁶ cells/kg.

### Treatment of GvHD

[0580] Patients who develop grade ≧1 acute GVHD are treated with 0.4 mg/kg AP1903 as a 2-hour infusion. AP1903 for injection may be provided, for example, as a concentrated solution of 2.33 ml in a 3 ml vial, at a concentration of 5 mg/ml, (i.e 11.66 mg per vial). AP1903 may also provided in different sized vials, for example, 8 ml at 5 mg/ml may be provided. Prior to administration, the calculated dose will be diluted to 100 mL in 0.9% normal saline for infusion. AP1903 for Injection (0.4 mg/kg) in a volume of 100 ml may be administered via IV infusion over 2 hours, using a non-DEHP, non-ethylene oxide sterilized infusion set and an infusion pump.

TABLE 4
Sample treatment schedule

| Time | Donor | Recipient |
|---|---|---|
| Pre-transplant | Obtain up to 240 of blood or | |
| | unstimulated leukapheresis | |
| | from bone marrow transplant | |
| | donor. Prepare T cells and | |
| | donor LCLs for later immune | |
| | reconstitution studies. | |
| Day 0 | Anti-CD3 activation of PBMC | |
| Day 2 | IL-2 feed | |
| Day 3 | Transduction | |
| Day 4 | Expansion | |
| Day 6 | CD19 selection. | |
| | Cryopreservation (*if required | |
| | dose is met) | |
| Day 8 | Assess transduction efficiency | |
| | and iCaspase9 transgene | |
| | functionality by phenotype. | |
| | Cryopreservation (*if not yet | |
| | performed) | |
| Day 10 or Day | Cryopreservation (if not yet | |
| 12 to Day 14 | performed) | |
| From 30 to 120 | | Thaw and infuse T |
| days post-transplant | | cells 30 to 120 |
| | | days post-stem |
| | | cell infusion. |

[0581] Other methods may be followed for clinical therapy and assessment as provided in, for example, Examples 1-3 herein.

### Example 5: Using the iCasp9 Suicide Gene to Improve the Safety of Mesenchymal Stromal Cell Therapies

[0582] Mesenchymal stromal cells (MSCs) have been infused into hundreds of patients to date with minimal reported deleterious side effects. The long term side effects are not known due to limited follow-up and a relatively short time since MSCs have been used in treatment of disease. Several animal models have indicated that there exists the potential for side effects, and therefore a system allowing control over the growth and survival of MSCs used therapeutically is desirable. The inducible Caspase-9 suicide switch expression vector construct presented herein was investigated as a method of eliminating MSC's in vivo and in vitro.

### Materials and Methods

### MSC Isolation

[0583] MSCs were isolated from healthy donors. Briefly, post-infusion discarded healthy donor bone marrow collection bags and filters were washed with RPMI 1640 (HyClone, Logan, Utah) and plated on tissue culture flasks in DMEM (Invitrogen, Carlsbad, Calif.) with 10% fetal bovine serum (FBS), 2 mM alanyl-glutamine (Glutamax, Invitrogen), 100 units/mL penicillin and 100 μg/mL streptomycin (Invitrogen). After 48 hours, the supernatant was discarded and the cells were cultured in complete culture medium (CCM): α-MEM (Invitrogen) with 16.5% FBS, 2 mM alanyl-glutamine, 100 units/mL penicillin and 100 μg/mL streptomycin. Cells were grown to less then 80% confluence and replated at lower densities as appropriate.

### Immunophenotyping

[0584] Phycoerythrin (PE), fluorescein isothiocyanate (FITC), peridinin chlorophyll protein (PerCP) or allophycocyanin (APC)-conjugated CD14, CD34, CD45, CD73, CD90, CD105 and CD133 monoclonal antibodies were used to stain MSCs. All antibodies were from Becton Dickinson-Pharmingen (San Diego, Calif.), except where indicated. Control samples labeled with an appropriate isotype-matched antibody were included in each experiment. Cells were analyzed by fluorescence-activated cell sorting FACScan (Becton Dickinson) equipped with a filter set for 4 fluorescence signals.

### Differentiation Studies In Vitro

[0585] Adipocytic differentiation. MSCs (7.5×10⁴ cells) were plated in wells of 6-well plates in NH AdipoDiff Medium (Miltenyi Biotech, Auburn, Calif.). Medium was changed every third day for 21 days. Cells were stained with Oil Red 0 solution (obtained by diluting 0.5% w/v Oil Red 0 in isopropanol with water at a 3:2 ratio), after fixation with 4% formaldehyde in phosphate buffered saline (PBS).

[0586] Osteogenic differentiation. MSCs (4.5×10⁴ cells) were plated in 6-well plates in NH OsteoDiff Medium (Miltenyi Biotech). Medium was changed every third day for 10 days. Cells were stained for alkaline phosphatase activity using Sigma Fast BCIP/NBT substrate (Sigma-Aldrich, St. Louis, Mo.) as per manufacturer instructions, after fixation with cold methanol.

[0587] Chondroblastic differentiation. MSC pellets containing 2.5×10⁵ to 5×10⁵ cells were obtained by centrifugation in 15 mL or 1.5 mL polypropylene conical tubes and cultured in NH ChondroDiff Medium (Miltenyi Biotech). Medium was changed every third day for a total of 24 days. Cell pellets were fixed in 4% formalin in PBS and processed for routine paraffin sectioning. Sections were stained with alcian blue or using indirect immunofluorescence for type II collagen (mouse anti-collagen type II monoclonal antibody MAB8887, Millipore, Billerica, Mass.) after antigen retrieval with pepsin (Thermo Scientific, Fremont, Calif.).

iCasp9-ΔCD19 Retrovirus Production and Transduction of MSCs

[0588] The SFG.iCasp9.2A.ΔCD19 (iCasp-ΔCD19) retrovirus consists of iCasp9 linked, via a cleavable 2A-like sequence, to truncated human CD19 (ΔCD19). As noted above, iCasp9 is a human FK506-binding protein (FKBP12) with an F36V mutation, which increases the binding affinity of the protein to a synthetic homodimerizer (AP20187 or AP1903), connected via a Ser-Gly-Gly-Gly-Ser-Gly linker (SEQ ID NO: 289) to human Caspase-9, whose recruitment domain (CARD) has been deleted, its function replaced by FKBP12.

[0589] The 2A-like sequence encodes a 20 amino acid peptide from Thosea Asigna insect virus, which mediates more than 99% cleavage between a glycine and terminal proline residue, to ensure separation of iCasp9 and ΔCD19 upon translation. ΔCD19 consists of human CD19 truncated at amino acid 333, which removes all conserved intracytoplasmic tyrosine residues that are potential sites for phosphorylation. A stable PG13 clone producing Gibbon ape leukemia virus (Gal-V) pseudotyped retrovirus was made by transiently transfecting Phoenix Eco cell line (ATCC product #SD3444; ATCC, Manassas, Va.) with SFG.iCasp9.2A.ΔCD19, which yielded Eco-pseudotyped retrovirus. The PG13 packaging cell line (ATCC) was transduced 3 times with Eco-pseudotyped retrovirus to generate a producer line that contained multiple SFG.iCasp9.2A.ΔCD19 proviral integrants per cell. Single-cell cloning was performed, and the PG13 clone that produced the highest titer was expanded and used for vector production. Retroviral supernatant was obtained via culture of the producer cell lines in IMDM (Invitrogen) with 10% FBS, 2 mM alanyl-glutamine, 100 units/mL penicillin and 100 μg/mL streptomycin. Supernatant containing the retrovirus was collected 48 and 72 hours after initial culture. For transduction, approximately 2×10⁴ MSCs/cm² were plated in CM in 6-well plates, T75 or T175 flasks. After 24 hours, medium was replaced by viral supernatant diluted 10-fold together with polybrene (final concentration 5 μg/mL) and the cells were incubated at 37° C. in 5% CO₂ for 48 hours, after which cells were maintained in complete medium.

### Cell Enrichment

[0590] For inducible iCasp9-ΔCD19-positive MSC selection for in vitro experiments, retrovirally transduced MSC were enriched for CD19-positive cells using magnetic beads (Miltenyi Biotec) conjugated with anti-CD19 (clone 4G7), per manufacturer instructions. Cell samples were stained with PE- or APC-conjugated CD19 (clone SJ25C1) antibody to assess the purity of the cellular fractions.

### Apoptosis Studies In Vitro

[0591] Undifferentiated MSCs. The chemical inducer of dimerization (CID) (AP20187; ARIAD Pharmaceuticals, Cambridge, Mass.) was added at 50 nM to iCasp9-transduced MSCs cultures in complete medium. Apoptosis was evaluated 24 hours later by FACS analysis, after cell harvest and staining with annexin V-PE and 7-AAD in annexin V binding buffer (BD Biosciences, San Diego, Calif.). Control iCasp9-transduced MSCs were maintained in culture without exposure to CID.

[0592] Differentiated MSCs. Transduced MSCs were differentiated as presented above. At the end of the differentiation period, CID was added to the differentiation media at 50 nM. Cells were stained appropriately for the tissue being studied, as presented above, and a contrast stain (methylene azur or methylene blue) was used to evaluate the nuclear and cytoplasmic morphology. In parallel, tissues were processed for terminal deoxynucleotidyl-transferase dUTP nick end labeling (TUNEL) assay as per manufacturer instructions (In Situ Cell Death Detection Kit, Roche Diagnostics, Mannheim, Germany). For each time point, four random fields were photographed at a final magnification of 40× and the images were analyzed with ImageJ software version 1.43o (NIH, Bethesda, Md.). Cell density was calculated as the number of nuclei (DAPI positivity) per unit of surface area (in mm²). The percentage of apoptotic cells was determined as the ratio of the number of nuclei with positive TUNEL signal (FITC positivity) to the total number of nuclei. Controls were maintained in culture without CID.

### In Vivo Killing Studies in Murine Model

[0593] All mouse experiments were performed in accordance with the Baylor College of Medicine animal husbandry guidelines. To assess the persistence of modified MSCs in vivo, a SCID mouse model was used in conjunction with an in vivo imaging system. MSCs were transduced with retroviruses coding for the enhanced green fluorescent protein-firefly luciferase (eGFP-FFLuc) gene alone or together with the iCasp9-ΔCD19 gene. Cells were sorted for eGFP positivity by fluorescence activated cell sorting using a MoFlo flow cytometer (Beckman Coulter, Fullerton, Calif.). Doubly transduced cells were also stained with PE-conjugated anti-CD19 and sorted for PE-positivity. SCID mice (8-10 weeks old) were injected subcutaneously with 5×10⁵ MSCs with and without iCasp9-ΔCD19 in opposite flanks. Mice received two intraperitoneal injections of 50 μg of CID 24 hours apart starting a week later. For in vivo imaging of MSCs expressing eGFP-FFLuc, mice were injected intraperitoneally with D-luciferin (150 mg/kg) and analyzed using the Xenogen-IVIS Imaging System. Total luminescence (a measurement proportional to the total labeled MSCs deposited) at each time point was calculated by automatically defining regions-of-interest (ROIs) over the MSC implantation sites. These ROIs included all areas with luminescence signals at least 5% above background. Total photon counts were integrated for each ROI and an average value calculated. Results were normalized so that time zero would correspond to 100% signal.

[0594] In a second set of experiments, a mixture of 2.5×10⁶ eGFP-FFLuc-labeled MSCs and 2.5×10⁶ eGFP-FFLuc-labeled, iCasp9-ΔCD19-transduced MSCs was injected subcutaneously in the right flank, and the mice received two intraperitoneal injections of 50 μg of CID 24 h apart starting 7 days later. At several time points after CID injection, the subcutaneous pellet of MSCs was harvested using tissue luminescence to identify and collect the whole human specimen and to minimize mouse tissue contamination. Genomic DNA was then isolated using QIAmp® DNA Mini (Qiagen, Valencia, Calif.). Aliquots of 100 ng of DNA were used in a quantitative PCR (qPCR) to determine the number of copies of each transgene using specific primers and probes (for the eGFP-FFLuc construct:

(SEQ ID NO: 291)

forward primer 5′-TCCGCCCTGAGCAAAGAC-3′,

(SEQ ID NO: 292)

reverse 5′-ACGAACTCCAGCAGGACCAT-3′,

(SEQ ID NO: 293)

probe 5′ FAM, 6-carboxyfluorescein-
ACGAGAAGCGCGATC-3′ MGBNFQ,
minor groove binding non-fluorescent quencher;

(SEQ ID NO: 294)

iCasp9-ΔCD19: forward 5′-CTGGAATCTGGCGGTGGAT-3′,

(SEQ ID NO: 295)

reverse 5′-CAAACTCTCAAGAGCACCGACAT-3′,

(SEQ ID NO: 296))

probe 5′ FAM-CGGAGTCGACGGATT-3′ MGBNFQ.

Known numbers of plasmids containing single copies of each transgene were used to establish standard curves. It was determined that approximately 100 ng of DNA isolated from “pure” populations of singly eGFP-FFLuc- or doubly eGFP-FFLuc- and iCasp9-transduced MSCs had similar numbers of eGFP-FFLuc gene copies (approximately 3.0×10⁴), as well as zero and 1.7×10³ of iCasp9-ΔCD19 gene copies, respectively.

[0595] Untransduced human cells and mouse tissues had zero copies of either gene in 100 ng of genomic DNA. Because the copy number of the eGFP gene is the same on identical amounts of DNA isolated from either population of MSCs (iCasp9-negative or positive), the copy number of this gene in DNA isolated from any mixture of cells will be proportional to the total number of eGFP-FFLuc-positive cells (iCasp9-positive plus negative MSCs). Moreover, because iCasp9-negative tissues do not contribute to the iCasp9 copy number, the copy number of the iCasp9 gene in any DNA sample will be proportional to the total number of iCasp9-positive cells. Therefore, if G is the total number of GFP-positive and iCasp9-negative cells and C the total number of GFP-positive and iCasp9-positive cells, for any DNA sample then N_{eGFP}=g·(C+G) and N_{icasp9}=k·C, where N represents gene copy number and g and k are constants relating copy number and cell number for the eGFP and iCasp9 genes, respectively. Thus N_{icasp9}/N_{eGFP}=(k/g)·[C/(C+G)], i.e., the ratio between iCasp9 copy number and eGFP copy number is proportional to the fraction of doubly transduced (iCasp9-positive) cells among all eGFP positive cells. Although the absolute values of N_{icasp9} and N_{eGFP} will decrease with increasing contamination by murine cells in each MSC explant, for each time point the ratio will be constant regardless of the amount of murine tissue included, since both types of human cells are physically mixed. Assuming similar rates of spontaneous apoptosis in both populations (as documented by in vitro culture) the quotient between N_{icasp9}/N_{eGFP} at any time point and that at time zero will represent the percentage of surviving iCasp9-positive cells after exposure to CID. All copy number determinations were done in triplicate.

### Statistical Analysis

[0596] Paired 2-tailed Student's t-test was used to determine the statistical significance of differences between samples. All numerical data are represented as mean±1 standard deviation.

### Results

[0597] MSCs are Readily Transduced with iCasp9-ΔCD19 and Maintain their Basic Phenotype

[0598] Flow cytometric analysis of MSCs from 3 healthy donors showed they were uniformly positive for CD73, CD90 and CD105 and negative for the hematopoietic markers CD45, CD14, CD133 and CD34. The mononuclear adherent fraction isolated from bone marrow was homogenously positive for CD73, CD90 and CD105 and negative for hematopoietic markers. The differentiation potential, of isolated MSCs, into adipocytes, osteoblasts and chondroblasts was confirmed in specific assays, demonstrating that these cells are bona fide MSCs.

[0599] Early passage MSCs were transduced with an iCasp9-ΔCD19 retroviral vector, encoding an inducible form of Caspase-9. Under optimal single transduction conditions, 47±6% of the cells expressed CD19, a truncated form of which is transcribed in cis with iCasp9, serving as a surrogate for successful transduction and allowing selection of transduced cells. The percentage of cells positive for CD19 was stable for more than two weeks in culture, suggesting no deleterious or growth advantageous effects of the construct on MSCs. The percentage of CD19-positive cells, a surrogate for successful transduction with iCasp9, remains constant for more than 2 weeks. To further address the stability of the construct, a population of iCasp9-positive cells purified by a fluorescence activated cell sorter (FACS) was maintained in culture: no significant difference in the percentage of CD19-positive cells was observed over six weeks (96.5±1.1% at baseline versus 97.4±0.8% after 43 days, P=0.46). The phenotype of the iCasp9-CD19-positive cells was otherwise substantially identical to that of untransduced cells, with virtually all cells positive for CD73, CD90 and CD105 and negative for hematopoietic markers, confirming that the genetic manipulation of MSCs did not modify their basic characteristics.

iCasp9-ΔCD19 Transduced MSCs Undergo Selective Apoptosis after Exposure to CID In Vitro

[0600] The proapoptotic gene product iCasp9 can activated by a small chemical inducer of dimerization (CID), AP20187, an analogue of tacrolimus that binds the FK506-binding domain present in the iCasp9 product. Non-transduced MSCs have a spontaneous rate of apoptosis in culture of approximately 18% (±7%) as do iCasp9-positive cells at baseline (15±6%, P=0.47). Addition of CID (50 nM) to MSC cultures after transduction with iCasp9-ΔCD19 results in the apoptotic death of more than 90% of iCasp9-positive cells within 24 hrs (93±1%, P<0.0001), while iCasp9-negative cells retain an apoptosis index similar to that of non-transduced controls (20±7%, P=0.99 and P=0.69 vs. non-transduced controls with or without CID respectively) (see FIGS. 17A and 70B). After transduction of MSCs with iCasp9, the chemical inducer of dimerization (CID) was added at 50 nM to cultures in complete medium. Apoptosis was evaluated 24 hours later by FACS analysis, after cell harvest and staining with annexin V-PE and 7-AAD. Ninety-three percent of the iCasp9-CD19-positive cells (iCasp pos/CID) became annexin positive versus only 19% of the negative population (iCasp neg/CID), a proportion comparable to non-transduced control MSC exposed to the same compound (Control/CID, 15%) and to iCasp9-CD19-positive cells unexposed to CID (iCasp pos/no CID, 13%), and similar to the baseline apoptotic rate of non-transduced MSCs (Control/no CID, 16%). Magnetic immunoselection of iCap9-CD19-positive cells can be achieved to high degree of purity. More than 95% of the selected cells become apoptotic after exposure to CID.

[0601] Analysis of a highly purified iCasp9-positive population at later time points after a single exposure to CID shows that the small fraction of iCasp9-negative cells expands and that a population of iCasp9-positive cells remains, but that the latter can be killed by re-exposure to CID. Thus, no iCasp9-positive population resistant to further killing by CID was detected. A population of iCasp9-CD19-negative MSCs emerges as early as 24 hours after CID introduction. A population of iCasp9-CD19-negative MSCs is expected since achieving a population with 100% purity is unrealistic and because the MSCs are being cultured in conditions that favor their rapid expansion in vitro. A fraction of iCasp9-CD19-positive population persists, as predicted by the fact that killing is not 100% efficient (assuming, for example, 99% killing of a 99% pure population, the resulting population would have 49.7% iCasp9-positive and 50.3% iCasp9-negative cells). The surviving cells, however, can be killed at later time points by re-exposure to CID.

iCasp9-ΔCD19 Transduced MSCs Maintain the Differentiation Potential of Unmodified MSCs and their Progeny is Killed by Exposure to CID

[0602] To determine if the CID can selectively kill the differentiated progeny of iCasp9-positive MSCs, immunomagnetic selection for CD19 was used to increase the purity of the modified population (>90% after one round of selection. The iCasp9-positive cells thus selected were able to differentiate in vivo into all connective tissue lineages studied (see FIGS. 19A-19Q). Human MSCs were immunomagnetically selected for CD19 (thus iCasp9) expression, with a purity greater than 91%. After culture in specific differentiation media, iCasp9-positive cells were able to give rise to adipocytic (A, oil red and methylene azur), osteoblastic (B, alkaline phosphatase-BCIP/NBT and methylene blue) and chondroblastic lineages (C, alcian blue and nuclear red) lineages. These differentiated tissues are driven to apoptosis by exposure to 50 nM CID (D-N). Note numerous apoptotic bodies (arrows), cytoplasmic membrane blebbing (inset) and loss of cellular architecture (D and E); widespread TUNEL positivity in chondrocytic nodules (F-H), and adipogenic (I-K) and osteogenic (L-N) cultures, in contrast to that seen in untreated iCasp9-transduced controls (adipogenic condition shown, O-Q) (F, I, L, O, DAPI; G, J, M, P, TUNEL-FITC; H, K, N, Q, overlay). After 24 hours of exposure to 50 nM of CID, microscopic evidence of apoptosis was observed with membrane blebbing, cell shrinkage and detachment, and presence of apoptotic bodies throughout the adipogenic and osteogenic cultures. A TUNEL assay showed widespread positivity in adipogenic and osteogenic cultures and the chondrocytic nodules (see FIGS. 19A-19Q), which increased over time. After culture in adipocytic differentiation media, iCasp9-positive cells gave rise to adipocytes. After exposure to 50 nM CID, progressive apoptosis was observed as evidenced by an increasing proportion of TUNEL-positive cells. After 24 hours, there was a significant decrease in cell density (from 584 cells/mm² to <14 cells/mm²), with almost all apoptotic cells having detached from the slides, precluding further reliable calculation of the proportion of apoptotic cells. Thus, iCasp9 remained functional even after MSC differentiation, and its activation results in the death of the differentiated progeny.

iCasp9-ΔCD19 Transduced MSCs Undergo Selective Apoptosis after In Vivo Exposure to CID

[0603] Although intravenously injected MSC already appear to have a short in vivo survival time, cells injected locally may survive longer and produce correspondingly more profound adverse effects. To assess the in vivo functionality of the iCasp9 suicide system in such a setting, SCID mice were subcutaneously injected with MSCs. MSCs were doubly transduced with the eGFP-FFLuc (previously presented) and iCasp9-ΔCD19 genes. MSCs were also singly transduced with eGFP-FFLuc. The eGFP-positive (and CD19-positive, where applicable) fractions were isolated by fluorescence activated cell sorting, with a purity >95%. Each animal was injected subcutaneously with iCasp9-positive and control MSCs (both eGFP-FFLuc-positive) in opposite flanks. Localization of the MSCs was evaluated using the Xenogen-IVIS Imaging System. In another set of experiments, a 1:1 mixture of singly and doubly transduced MSCs was injected subcutaneously in the right flank and the mice received CID as above. The subcutaneous pellet of MSCs was harvested at different time points, genomic DNA was isolated and qPCR was used to determine copy numbers of the eGFP-FFLuc and iCasp9-ΔCD19 genes. Under these conditions, the ratio of the iCasp9 to eGFP gene copy numbers is proportional to the fraction of iCasp9-positive cells among total human cells (see Methods above for details). The ratios were normalized so that time zero corresponds to 100% of iCasp9-positive cells. Serial examination of animals after subcutaneous inoculation of MSCs (prior to CID injection) shows evidence of spontaneous apoptosis in both cell populations (as demonstrated by a fall in the overall luminescence signal to ˜20% of the baseline). This has been previously observed after systemic and local delivery of MSCs in xenogeneic models.

[0604] The luminescence data showed a substantial loss of human MSCs over the first 96 h after local delivery of MSCs, even before administration of CID, with only approximately 20% cells surviving after one week. From that time point onward, however, there were significant differences between the survival of icasp9-positive MSCs with and without dimerizer drug. Seven days after MSC implantation, animals were given two injections of 50 μg of CID, 24 hours apart. MSCs transduced with iCasp9 were quickly killed by the drug, as demonstrated by the disappearance of their luminescence signal. Cells negative for iCasp9 were not affected by the drug. Animals not injected with the drug showed persistence of signal in both populations up to a month after MSC implantation. To further quantify cell killing, qPCR assays were developed to measure copy numbers of the eGFP-FFLuc and iCasp9-ΔCD19 genes. Mice were injected subcutaneously with a 1:1 mixture of doubly and singly transduced MSCs and administered CID as above, one week after MSC implantation. MSCs explants were collected at several time points, genomic DNA isolated from the samples and qPCR assays performed on substantially identical amounts of DNA. Under these conditions (see Methods), at any time point, the ratio of iCasp9-ΔCD19 to eGFP-FFLuc copy numbers is proportional to the fraction of viable iCasp9-positive cells. Progressive killing of iCasp9-positive cells was observed (>99%) so that the proportion of surviving iCasp9-positive cells was reduced to 0.7% of the original population after one week. Therefore, MSCs transduced with iCasp9 can be selectively killed in vivo after exposure to CID, but otherwise persist.

### Discussion

[0605] The feasibility of engineering human MSCs to express a safety mechanism using an inducible suicide protein is demonstrated herein. The date presented herein show that MSC can be readily transduced with the suicide gene iCasp9 coupled to the selectable surface maker CD19. Expression of the co-transduced genes is stable both in MSCs and their differentiated progeny, and does not evidently alter their phenotype or potential for differentiation. These transduced cells can be killed in vitro and in vivo when exposed to the appropriate small molecule chemical inducer of dimerization that binds to the iCasp9.

[0606] For a cell based therapy to be successful, transplanted cells must survive the period between their harvest and their ultimate in vivo clinical application. Additionally, a safe cell based therapy also should include the ability to control the unwanted growth and activity of successfully transplanted cells. Although MSCs have been administered to many patients without notable side effects, recent reports indicate additional protections, such as the safety switch presented herein, may offer additional methods of control over cell based therapies as the potential of transplanted MSC to be genetically and epigenetically modified to enhance their functionality, and to differentiate into lineages including bone and cartilage is further investigated and exploited. Subjects receiving MSCs that have been genetically modified to release biologically active proteins might particularly benefit from the added safety provided by a suicide gene.

[0607] The suicide system presented herein offers several potential advantages over other known suicide systems. Strategies involving nucleoside analogues, such as those combining Herpes Simplex Virus thymidine kinase (HSV-tk) with gancyclovir (GCV) and bacterial or yeast cytosine deaminase (CD) with 5-fluoro-cytosine (5-FC), are cell-cycle dependent and are unlikely to be effective in the post-mitotic tissues that may be formed during the application of MSCs to regenerative medicine. Moreover, even in proliferating tissues the mitotic fraction does not comprise all cells, and a significant portion of the graft may survive and remain dysfunctional. In some instance, the prodrugs required for suicide may themselves have therapeutic uses that are therefore excluded (e.g., GCV), or may be toxic (e.g., 5-FC), either as a result of their metabolism by non-target organs (e.g., many cytochrome P450 substrates), or due to diffusion to neighboring tissues after activation by target cells (e.g., CB1954, a substrate for bacterial nitroreductase).

[0608] In contrast, the small molecule chemical inducers of dimerization presented herein have shown no evidence of toxicities even at doses ten fold higher than those required to activate the iCasp9. Additionally, nonhuman enzymatic systems, such as HSV-tk and DC, carry a high risk of destructive immune responses against transduced cells. Both the iCasp9 suicide gene and the selection marker CD19, are of human origin, and thus should be less likely to induce unwanted immune responses. Although linkage of expression of the selectable marker to the suicide gene by a 2A-like cleavable peptide of nonhuman origin could pose problems, the 2A-like linker is 20 amino acids long, and is likely less immunogenic than a nonhuman protein. Finally, the effectiveness of suicide gene activation in iCasp9-positive cells compares favorably to killing of cells expressing other suicide systems, with 90% or more of iCasp9-modified T cells eliminated after a single dose of dimerizer, a level that is likely to be clinically efficacious.

[0609] The iCasp9 system presented herein also may avoid additional limitations seen with other cell based and/or suicide switch based therapies. Loss of expression due to silencing of the transduced construct is frequently observed after retroviral transduction of mammalian cells. The expression constructs presented herein showed no evidence of such an effect. No decrease in expression or induced death was evident, even after one month in culture.

[0610] Another potential problem sometimes observed in other cell based and/or suicide switch based therapies, is the development of resistance in cells that have upregulated anti-apoptotic genes. This effect has been observed in other suicide systems involving different elements of the programmed cell death pathways such as Fas. iCasp9 was chosen as the suicide gene for the expression constructs presented herein because it was less likely to have this limitation. Compared to other members of the apoptotic cascade, activation of Caspase-9 occurs late in the apoptotic pathway and therefore should bypass the effects of many if not all anti-apoptotic regulators, such as c-FLIP and bcl-2 family members.

[0611] A potential limitation specific to the system presented herein may be spontaneous dimerization of iCasp9, which in turn could cause unwanted cell death and poor persistence. This effect has been observed in certain other inducible systems that utilize Fas. The observation of low spontaneous death rate in transduced cells and long term persistence of transgenic cells in vivo indicate this possibility is not a significant consideration when using iCasp9 based expression constructs.

[0612] Integration events deriving from retroviral transduction of MSCs may potentially drive deleterious mutagenesis, especially when there are multiple insertions of the retroviral vector, causing unwanted copy number effects and/or other undesirable effects. These unwanted effects could offset the benefit of a retrovirally transduced suicide system. These effects often can be minimized using clinical grade retroviral supernatant obtained from stable producer cell lines and similar culture conditions to transduce T lymphocytes. The T cells transduced and evaluated herein contain in the range of about 1 to 3 integrants (the supernatant containing in the range of about 1×10⁶ viral particles/m L). The substitution of lentiviral for retroviral vectors could further reduce the risk of genotoxicity, especially in cells with high self-renewal and differentiation potential.

[0613] While a small proportion of iCasp9-positive MSCs persists after a single exposure to CID, these surviving cells can subsequently be killed following re-exposure to CID. In vivo, there is >99% depletion with two doses, but it is likely that repeated doses of CID will be needed for maximal depletion in the clinical setting. Additional non-limiting methods of providing extra safety when using an inducible suicide switch system include additional rounds of cell sorting to further increase the purity of the cell populations administered and the use of more than one suicide gene system to enhance the efficiency of killing.

[0614] The CD19 molecule, which is physiologically expressed by B lymphocytes, was chosen as the selectable marker for transduced cells, because of its potential advantages over other available selection systems, such as neomycin phosphotransferase (neo) and truncated low affinity nerve growth factor receptor (ΔLNGFR). “neo” encodes a potentially immunogenic foreign protein and requires a 7-day culture in selection medium, increasing the complexity of the system and potentially damaging the selected cells. ΔLNGFR expression should allow for isolation strategies similar to other surface markers, but these are not widely available for clinical use and a lingering concern remains about the oncogenic potential of ΔLNGFR. In contrast, magnetic selection of iCasp9-positive cells by CD19 expression using a clinical grade device is readily available and has shown no notable effects on subsequent cell growth or differentiation.

[0615] The procedure used for preparation and administration of mesenchymal stromal cells comprising the Caspase-9 safety switch may also be used for the preparation of embryonic stem cells and inducible pluripotent stem cells. Thus for the procedures outlined in the present example, either embryonic stem cells or inducible pluripotent stem cells may be substituted for the mesenchymal stromal cells provided in the example. In these cells, retroviral and lentiviral vectors may be used, with, for example, CMV promoters, or the ronin promoter.

### Example 6: Modified Caspase-9 Polypeptides with Lower Basal Activity and Minimal Loss of Ligand IC₅₀

[0616] Basal signaling, signaling in the absence of agonist or activating agent, is prevalent in a multitude of biomolecules. For example, it has been observed in more than 60 wild-type G protein coupled receptors (GPCRs) from multiple subfamilies [1], kinases, such as ERK and abl [2], surface immunoglobulins [3], and proteases. Basal signaling has been hypothesized to contribute to a vast variety of biological events, from maintenance of embryonic stem cell pluripotency, B cell development and differentiation [4-6], T cell differentiation [2, 7], thymocyte development [8], endocytosis and drug tolerance [9], autoimmunity [10], to plant growth and development [11]. While its biological significance is not always fully understood or apparent, defective basal signaling can lead to serious consequences. Defective basal Gₛ protein signaling has led to diseases, such as retinitis pigmentosa, color blindness, nephrogenic diabetes insipidus, familial ACTH resistance, and familial hypocalciuric hypercalcemia [12, 13].

[0617] Even though homo-dimerization of wild-type initiator Caspase-9 is energetically unfavorable, making them mostly monomers in solution [14-16], the low-level inherent basal activity of unprocessed Caspase-9 [15, 17] is enhanced in the presence of the Apaf-1-based “apoptosome”, its natural allosteric regulator [6]. Moreover, supra-physiological expression levels and/or co-localization could lead to proximity-driven dimerization, further enhancing basal activation. In the chimeric unmodified Caspase-9 polypeptide, innate Caspase-9 basal activity was significantly diminished by removal of the CAspase-Recruitment pro-Domain (CARD) [18], replacing it with the cognate high affinity AP1903-binding domain, FKBP12-F36V. Its usefulness as a pro-apoptotic “safety switch” for cell therapy has been well demonstrated in multiple studies [18-20]. While its high specific and low basal activity has made it a powerful tool in cell therapy, in contrast to G protein coupled receptors, there are currently no “inverse agonists” [21] to eliminate basal signaling, which may be desirable for manufacturing, and in some applications. Preparation of Master Cell Banks has proven challenging due to high amplification of the low-level basal activity of the chimeric polypeptide. In addition, some cells are more sensitive than others to low-level basal activity of Caspase-9, leading to unintended apoptosis of transduced cells [18].

[0618] To modify the basal activity of the chimeric Caspase-9 polypeptide, “rational design”-based methods were used to engineer 75i Casp9 mutants based on residues known to play crucial roles in homo-dimerization, XIAP-mediated inhibition, or phosphorylation (Table below) rather than “directed evolution” [22] that use multiple cycles of screening as selective pressure on randomly generated mutants. Dimerization-driven activation of Caspase-9 has been considered a dominant model of initiator Caspase activation [15, 23, 24]. To reduce spontaneous dimerization, site-directed mutagenesis was conducted of residues crucial for homo-dimerization and thus basal Caspase-9 signaling. Replacement of five key residues in the β6 strand (G402-C-F-N-F406 (SEQ ID NO: 297)), the key dimerization interface of Caspase-9, with those of constitutively dimeric effector Caspase-3 (C264-I-V-S-M268 (SEQ ID NO: 298)) converted it to a constitutively dimeric protein unresponsive to Apaf-1 activation without significant structural rearrangements [25]. To modify spontaneous homo-dimerization, systemic mutagenesis of the five residues was made, based on amino acid chemistry, and on corresponding residues of initiator Caspases-2, -8, -9, and −10 that exist predominately as a monomer in solution [14, 15]. After making and testing twenty-eight iCasp9 mutants by a secreted alkaline phosphatase (SEAP)-based surrogate killing assay (Table, below), the N405Q mutation was found to lower basal signaling with a moderate (<10-fold) cost of higher IC₅₀ to AP1903.

[0619] Since proteolysis, typically required for Caspase activation, is not absolutely required for Caspase-9 activation [26], the thermodynamic “hurdle” was increased to inhibit auto-proteolysis. In addition, since XIAP-mediated Caspase-9 binding traps Caspase-9 in a monomeric state to attenuate its catalytic and basal activity [14], there was an effort to strengthen the interaction between XIAP and Caspase-9 by mutagenizing the tetrapeptide critical for interaction with XIAP (A316-T-P-F319 (SEQ ID NO: 299), D330-A-I-S-S334 (SEQ ID NO: 301)). From 17 of these iCasp-9 mutants, it was determined that the D330A mutation lowered basal signaling with a minimum (<5-fold) AP1903 IC₅₀ cost.

[0620] The third approach was based on previously reported findings that Caspase-9 is inhibited by kinases upon phosphorylation of S144 by PKC-ζ [27], S183 by protein kinase A [28], S196 by Akt1 [29], and activated upon phosphorylation of Y153 by c-abl [30]. These “brakes” might improve the IC₅₀, or substitutions with phosphorylation mimic (“phosphomimetic”) residues could augment these “brakes” to lower basal activity. However, none of the 15 single residue mutants based on these residues successfully lowered the IC₅₀ to AP1903.

[0621] Methods such as those discussed, for example, in Examples 1-5, and throughout the present application may be applied, with appropriate modifications, if necessary to the chimeric modified Caspase-9 polypeptides, as well as to various therapeutic cells.

### Example 7: Materials and Methods

### PCR Site-Directed Mutagenesis of Caspase-9:

[0622] To modify basal signaling of Caspase-9, PCR-based site directed mutagenesis [31] was done with mutation-containing oligos and Kapa (Kapa Biosystems, Woburn, Mass.). After 18 cycles of amplification, parental plasmid was removed with methylation-dependent Dpnl restriction enzyme that leaves the PCR products intact. 2 μl of resulting reaction was used to chemically transform XL1-blue or DH5α. Positive mutants were subsequently identified via sequencing (SeqWright, Houston, Tex.).

### Cell Line Maintenance and Transfection:

[0623] Early passage HEK293T/16 cells (ATCC, Manassas, Va.) were maintained in IMDM, GlutaMAX™ (Life Technologies, Carlsbad, Calif.) supplemented with 10% FBS, 100 U/mL penicillin, and 100 U/mL streptomycin until transfection in a humidified, 37° C., 5% CO₂/95% air atmosphere. Cells in logarithmic-phase growth were transiently transfected with 800 ng to 2 μg of expression plasmid encoding iCasp9 mutants and 500 ng of an expression plasmid encoding SRα promoter driven SEAP per million cells in 15-mL conical tubes. Catalytically inactive Caspase-9 (C285A) (without the FKBP domain) or “empty” expression plasmid (“pSH1-null”) were used to keep the total plasmid levels constant between transfections. GeneJammer® Transfection Reagent at a ratio of 3 μl per ug of plasmid DNA was used to transiently transfect HEK293T/16 cells in the absence of antibiotics. 100 μl or 2 mL of the transfection mixture was added to each well in 96-well or 6-well plate, respectively. For SEAP assays, log dilutions of AP1903 were added after a minimum 3-hour incubation post-transfection. For western blots, cells were incubated for 20 minutes with AP1903 (10 nM) before harvesting.

### Secreted Alkaline Phosphatase (SEAP) Assay:

[0624] Twenty-four to forty-eight hours after AP1903 treatment, ˜100 μl of supernatants were harvested into a 96-well plate and assayed for SEAP activity as discussed [19, 32]. Briefly, after 65° C. heat denaturation for 45 minutes to reduce background caused by endogenous (and serum-derived) alkaline phosphatases that are sensitive to heat, 5 μl of supernatants was added to 95 μl of PBS and added to 100 μl of substrate buffer, containing 1 μl of 100 mM 4-methylumbelliferyl phosphate (4-MUP; Sigma, St. Louis, Mo.) re-suspended in 2 M diethanolamine. Hydrolysis of 4-MUP by SEAP produces a fluorescent substrate with excitation/emission (355/460 nm), which can be easily measured. Assays were performed in black opaque 96-well plates to minimize fluorescence leakage between wells. To examine both basal signaling and AP1903 induced activity, 106 early-passage HEK293T/16 cells were co-transfected with various amount of wild type Caspase and 500 ng of an expression plasmid that uses an SRα promoter to drive SEAP, a marker for cell viability. Following manufacturer's suggestions, 1 mL of IMDM+10% FBS without antibiotics was added to each mixture. 1000-μl of the mixture was seeded onto each well of a 96-well plate. 100-μl of AP1903 was added at least three hours post-transfection. After addition of AP1903 for at least 24 hours, 100-μl of supernatant was transferred to a 96-well plate and heat denatured at 68° C. for 30 minutes to inactivate endogenous alkaline phosphatases. For the assay, 4-methylumbelliferyl phosphate substrate was hydrolyzed by SEAP to 4-methylumbelliferon, a metabolite that can be excited with 364 nm and detected with an emission filter of 448 nm. Since SEAP is used as a marker for cell viability, reduced SEAP reading corresponds with increased iCaspase-9 activities. Thus, a higher SEAP reading in the absence of AP1903 would indicate lower basal activity. Desired caspase mutants would have diminished basal signaling with increased sensitivity (i.e., lower IC₅₀) to AP1903. The goal of the study is to reduce basal signaling without significantly impairing IC₅₀.

### Western Blot Analysis:

[0625] HEK293T/16 cells transiently transfected with 2 μg of plasmid for 48-72 hours were treated with AP1903 for 7.5 to 20 minutes (as indicated) at 37° C. and subsequently lysed in 500 μl of RIPA buffer (0.01 M Tris.HCl, pH 8.0/140 mM NaCl/1% Triton X-100/1 mM phenylmethylsulfonyl fluoride/1% sodium deoxycholate/0.1% SDS) with Halt™ Protease Inhibitor Cocktail. The lysates were collected and lysed on ice for 30 min. After pelleting cell debris, protein concentrations from overlying supernatants were measured in 96-well plates with BCA™ Protein Assay as recommended by the manufacturer. 30 μg of proteins were boiled in Laemmli sample buffer (Bio-Rad, Hercules, Calif.) with 2.5% 2-mercaptoethanol for 5 min at 95° C. before being separated by Criterion TGX 10% Tris/glylcine protein gel. Membranes were probed with 1/1000 rabbit anti-human Caspase-9 polyclonal antibody followed by 1/10,000 HRP-conjugated goat anti-rabbit IgG F(ab′)2 secondary antibody (Bio-Rad). Protein bands were detected using Supersignal West Femto chemiluminescent substrate. To ensure equivalent sample loading, blots were stripped at 65° C. for 1 hour with Restore PLUS Western Blot Stripping Buffer before labeling with 1/10,000 rabbit anti-actin polyclonal antibody. Unless otherwise stated, all the reagents were purchased from Thermo Scientific.

[0626] Methods and constructs discussed in Examples 1-5, and throughout the present specification may also be used to assay and use the modified Caspase-9 polypeptides.

### Example 8: Evaluation and Activity of Chimeric Modified Caspase-9 Polypeptides

### Comparison of Basal Activity and AP1903 Induced Activity:

[0627] To examine both basal activity and AP1903 induced activity of the chimeric modified Caspase-9 polypeptides, SEAP activities of HEK293T/16 cells co-transfected with SEAP and different amounts of iCasp9 mutants were examined. iCasp9 D330A, N405Q, and D330A-N405Q showed significantly less basal activity than unmodified iCasp9 for cells transfected with either 1 μg iCasp9 per million cells (relative SEAP activity Units of 148928, 179081, 205772 vs. 114518) or 2 μg iCasp9 per million cells (136863, 175529, 174366 vs. 98889). The basal signaling of all three chimeric modified Caspase-9 polypeptides when transfected at 2 μg per million cells was significantly higher (p value<0.05). iCasp9 D330A, N405Q, and D330A-N405Q also showed increased estimated IC₅₀ for AP1903, but they are all still less than 6 μM (based on the SEAP assay), compared to 1 μM for WT, making them potentially useful apoptosis switches.

### Evaluation of Protein Expression Levels and Proteolysis:

[0628] To exclude the possibility that the observed reduction in basal activity of the chimeric modified Caspase-9 polypeptides was attributable to decreased protein stability or variation in transfection efficiency, and to examine auto-proteolysis of iCasp9, the protein expression levels of Caspase-9 variants in transfected HEK293T/16 cells was assayed. Protein levels of chimeric unmodified Caspase-9 polypeptide, iCasp9 D330A, and iCasp9 D330A-N405Q all showed similar protein levels under the transfection conditions used in this study. In contrast, the iCasp9 N405Q band appeared darker than the others, particularly when 2 μg of expression plasmids was used. Auto-proteolysis was not easily detectable at the transfection conditions used, likely because only viable cells were collected. Anti-actin protein reblotting confirmed that comparable lysate amounts were loaded into each lane. These results support the observed lower basal signaling in the iCasp9 D330A, N405Q, and D330A-N405Q mutants, observed by SEAP assays.

### Discussion

[0629] Based on the SEAP screening assay, these three chimeric modified Caspase-9 polypeptides showed higher AP1903-independent SEAP activity, compared to iCasp9 WT transfectants, and hence lower basal signaling. However, the double mutation (D330-N405Q) failed to further decrease either basal activity or IC₅₀ (0.05 nM) vs. the single amino acid mutants. The differences observed did not appear to be due to protein instability or differential amount of plasmids used during transfection.

### Example 9: Evaluation and Activity of Chimeric Modified Caspase-9 Polypeptides

[0630] Inducible Caspase-9 provides for rapid, cell-cycle-independent, cell autonomous killing in an AP1903-dependent fashion. Improving the characteristics of this inducible Caspase-9 polypeptide would allow for even broader applicability. It is desirable to decrease the protein's ligand-independent cytotoxicity, and increase its killing at low levels of expression. Although ligand-independent cytotoxicity is not a concern at relatively low levels of expression, it can have a material impact where levels of expression can reach one or more orders of magnitude higher than in primary target cells, such as during vector production. Also, cells can be differentially sensitive to low levels of caspase expression due to the level of apoptosis inhibitors, like XIAP and Bcl-2, which cells express. Therefore, to re-engineer the caspase polypeptide to have a lower basal activity and possibly higher sensitivity to AP1903 ligand, four mutagenesis strategies were devised.

[0631] Dimerization Domain: Although Caspase-9 is a monomer in solution at physiological levels, at high levels of expression, such as occurs in the pro-apoptotic, Apaf-driven “apoptosome”, Caspase-9 can dimerize, leading to auto-proteolysis at D315 and a large increase in catalytic activity. Since C285 is part of the active site, mutation C285A is catalytically inactive and is used as a negative control construct. Dimerization involves very close interaction of five residues in particular, namely G402, C403, F404, N405, and F406. For each residue, a variety of amino acid substitutions, representing different classes of amino acids (e.g., hydrophobic, polar, etc.) were constructed. Interestingly, all mutants at G402 (i.e., G402A, G4021, G402Q, G402Y) and C403P led to a catalytically inactive caspase polypeptide. Additional C403 mutations (i.e., 0403A, 0403S, and C403T) were similar to the wild type caspase and were not pursued further. Mutations at F404 all lowered basal activity, but also reflected reduced sensitivity to IC₅₀, from ˜1 log to unmeasurable. In order of efficacy, they are: F404Y>F404T, F404W>>F404A, F4045. Mutations at N405 either had no effect, as with N405A, increased basal activity, as in N405T, or lowered basal activity concomitant with either a small (˜5-fold) or larger deleterious effect on IC₅₀, as with N405Q and N405F, respectively. Finally, like F404, mutations at F406 all lowered basal activity, and reflected reduced sensitivity to 1050, from ˜1 log to unmeasurable. In order of efficacy, they are: F406A F406W, F406Y>F406T>>F406L.

[0632] Some polypeptides were constructed and tested that had compound mutations within the dimerization domain, but substituting the analogous 5 residues from other caspases, known to be monomers (e.g., Caspase-2,-8, -10) or dimers (e.g., Caspase-3) in solution. Caspase-9 polypeptides, containing the 5-residue change from Caspase-2, -3, and -8, along with an AAAAA (SEQ ID NO: 302) alanine substitution were all catalytically inactive, while the equivalent residues from Caspase-10 (ISAQT (SEQ ID NO: 303)), led to reduced basal activity but higher IC₅₀.

[0633] Overall, based on the combination of consistently lower basal activity, combined with only a mild effect on IC₅₀, N405Q was selected for further experiments. To improve on efficacy, a codon-optimized version of the modified Caspase-9 polypeptide, having the N405Q substitution, called N405Qco, was tested. This polypeptide appeared marginally more sensitive to AP1903 than the wild type N405Q-substituted Caspase-9 polypeptide.

[0634] Cleavage site mutants: Following aggregation of Caspase-9 within the apoptosome or via AP1903-enforced homodimerization, auto-proteolysis at D315 occurs. This creates a new amino-terminus at A316, at least transiently. Interestingly, the newly revealed tetra-peptide, ³¹⁶ATPF³¹⁹ (SEQ ID NO: 299), binds to the Caspase-9 inhibitor, XIAP, which competes for dimerization with Caspase-9 itself at the dimerization motif, GCFNF (SEQ ID NO: 297), discussed above. Therefore, the initial outcome of D315 cleavage is XIAP binding, attenuating further Caspase-9 activation. However, a second caspase cleavage site exists at D330, which is the target of downstream effector caspase, caspase-3. As the pro-apoptotic pressure builds, D330 becomes increasingly cleaved, releasing the XIAP-binding small peptide within residue 316 to 330, and hence, removing this mitigating Caspase-9 inhibitor. A D330A mutant was constructed, which lowered basal activity, but not as low as in N405Q. By SEAP assay at high copy number, it also revealed a slight increase in IC₅₀, but at low copy number in primary T cells, there was actually a slight increase in IC₅₀ with improved killing of target cells. Mutation at auto-proteolysis site, D315, also reduced basal activity, but this led to a large increase in IC₅₀, likely as D330 cleavage was then necessary for caspase activation. A double mutation at D315A and D330A, led to an inactive “locked” Caspase-9 that could not be processed properly.

[0635] Other D330 mutants were created, including D330E, D330G, D330N, D330S, and D330V. Mutation at D327 also prevented cleavage at D330, as the consensus Caspase-3 cleavage site is DxxD, but several D327 mutations (i.e., D327G, D327K, and D327R) along with F326K, Q328K, Q328R, L329K, L329G, and A331K, unlike D330 mutations, did not lower basal activity and were not pursued further.

[0636] XIAP-binding mutants: As discussed above, autoproteolysis at D315 reveals an XIAP-binding tetrapeptide, ³¹⁶ATPF³¹⁹ (SEQ ID NO: 299), which “lures” XIAP into the Caspase-9 complex. Substitution of ATPF (SEQ ID NO: 299) with the analogous XIAP-binding tetrapeptide, AVPI (SEQ ID NO: 304), from mitochondria-derived anti-XIAP inhibitor, SMAC/DIABLO, might bind more tightly to XIAP and lower basal activity. However, this 4-residue substitution had no effect. Other substitutions within the ATPF motif (SEQ ID NO: 299) ranged from no effect, (i.e., T317C, P318A, F319A) to lower basal activity with either a very mild (i.e., T317S, mild (i.e., T317A) to large (i.e., A316G, F319W) increase in IC₅₀. Overall, the effects of changing the XIAP-binding tetrapeptide were mild; nonetheless, T317S was selected for testing in double mutations (discussed below), since the effects on IC₅₀ were the most mild of the group.

[0637] Phosphorylation mutants: A small number of Caspase-9 residues were reported to be the targets of either inhibitory (e.g., S144, S183, S195, S196, S307, T317) or activating (i.e., Y153) phosphorylations. Therefore, mutations that either mimic the phosphorylation (“phosphomimetics”) by substitution with an acidic residue (e.g., Asp) or eliminate phosphorylation were tested. In general, most mutations, regardless of whether a phosphomimetic or not was tried, lowered basal activity. Among the mutants with lower basal activity, mutations at S144 (i.e., S144A and S144D) and S1496D had no discernable effect on IC₅₀, mutants S183A, S195A, and S196A increased the IC₅₀ mildly, and mutants Y153A, Y153A, and S307A had a big deleterious effect on IC₅₀. Due to the combination of lower basal activity and minimal, if any effect on IC₅₀, S144A was chosen for double mutations (discussed below).

[0638] Double mutants: In order to combine the slightly improved efficacy of D330A variant with possible residues that could further lower basal activity, numerous D330A double mutants were constructed and tested. Typically, they maintained lower basal activity with only a slight increase in IC₅₀, including 2nd mutations at N405Q, S144A, S144D, S183A, and S196A. Double mutant D330A-N405T had higher basal activity and double mutants at D330A with Y153A, Y153F, and T317E were catalytically inactive. A series of double mutants with low basal activity N405Q, intended to improve efficacy or decrease the IC₅₀ was tested. These all appeared similar to N405Q in terms of low basal activity and slightly increased IC₅₀ relative to iC9-1.0, and included N405Q with S144A, S144D, S196D, and T317S.

[0639] SEAP assays were conducted to study the basal activity and CID sensitivity of some of the dimerization domain mutants. N405Q was the most AP1903-sensitive of the mutants tested with lower basal activity than the WT Caspase-9, as determined by a shift upwards of AP1903-independent signaling. F406T was the least CID-sensitive from this group.

[0640] The dimer-independent SEAP activity of mutant caspase polypeptides D330A and N405Q was assayed, along with double mutant D330A-N405Q. The results of multiple transfections (N=7 to 13) found that N405Q has lower basal activity than D330A and the double mutant is intermediate.

[0641] Obtaining the average (+stdev, n=5) IC₅₀ of mutant caspase polypeptides D330A and N405Q, along with double mutant D330A-N405Q shows that D330A is somewhat more sensitive to AP1903 than N405Q mutants but about 2-fold less sensitive than WT Caspase-9 in a transient transfection assay.

[0642] SEAP assays were conducted using wild type (WT) Caspase-9, N405Q, inactive C285A, and several T317 mutants within the XIAP-binding domain. The results show that T317S and T317A can reduce basal activity without a large shift in the IC₅₀ to APf1903. Therefore, T317S was chosen to make double mutants with N405Q.

[0643] IC₅₀s from the SEAP assays above showed that T317A and T317S have similar IC₅₀s to wild type Caspase-9 polypeptide despite having lower basal activity.

[0644] The dimer-independent SEAP activity from several D330 mutants showed that all members of this class tested, including D330A, D330E, D330N, D330V, D330G, and D330S, have less basal activity than wild type Caspase-9. Basal and AP1903-induced activation of D330A variants was assayed. SEAP assay of transiently transfected HEK293/16 cells with 1 or 2 ug of mutant caspase polypeptides and 0.5 ug of pSH1-kSEAP per million HEK293 cells, 72 hours post-transfection. Normalized data based on 2 ug of each expression plasmid (including WT) were mixed with normalized data from 1 ug-based transfections. iCasp9-D330A, -D330E, and -D330S showed statistically lower basal signaling than wildtype Caspase-9.

[0645] The result of a western blot shoed that the D330 mutations block cleavage at D330, leading to a slightly largely (slower migrating) small band (<20 kDa marker). Other blots show that D327 mutation also blocks cleavage.

[0646] The mean fluorescence intensities of multiple clones of PG13 transduced 5× with retroviruses encoding the indicated Caspase-9 polypeptides was measured. Lower basal activity typically translates to higher levels of expression of the Caspase-9 gene along with the genetically linked reporter, CD19. The results show that on the average, clones expressing the N405Q mutant express higher levels of CD19, reflecting the lower basal activity of N405Q over D330 mutants or WT Caspase-9. The effects of various caspase mutations on viral titers derived from PG13 packaging cells cross-transduced with VSV-G envelope-based retroviral supernatants was assayed. To examine the effect of iC9-derived basal signaling on retrovirus master cell line production, retrovirus packaging cell line, PG13, was cross-transduced five times with VSV-G-based retroviral supernatants in the presence of 4 μg/ml transfection-enhancer, polybrene. iC9-transduced PG13 cells were subsequently stained with PE-conjugated anti-human CD19 antibody, as an indication of transduction. iC9-D330A, -D330E, and -N405Q-transduced PG13 cells showed enhanced CD19 mean fluorescence intensity (MFI), indicating higher retroviral copy numbers, implying lower basal activity. To more directly examine the viral titer of the PG13 transductants, HT1080 cells were treated with viral supernatant and 8 ug/ml polybrene. The enhanced CD19 MFIs of iCasp9-D330A, -N405Q, and -D330E transductants vs WT iCasp9 in PG13 cells are positively correlated with higher viral titers, as observed in HT1080 cells. Due to the initially low viral titers (approximately 1E5 transduction units (TU)/ml), no differences in viral titers were observed in the absence of HAT treatment to increase virus yields. Upon HAT media treatment, PG13 cells transduced with iC9-D330A, -N405Q, or -D330E demonstrated higher viral titers. Viral titer (transducing units) is calculated with the formula: Viral titer=(# cells on the day of transduction)*(% CD19⁺)/Volume of supernatant (ml). In order to further investigate the effect of iC9 mutants with lower basal activity, individual clones (colonies) of iC9-transduced PG13 cells were selected and expanded. iC9-N405Q clones with higher CD19 MFIs than the other cohorts were observed.

[0647] The effects of various caspase polypeptides at mostly single copy in primary T cells was assayed. This may reflect more accurately how these suicide genes will be used therapeutically. Surprisingly, the data show that the D330A mutant is actually more sensitive to AP1903 at low titers and kills at least as well as WT Caspase-9 when tested in a 24-hour assay. The N405Q mutant is less sensitive to AP1903 and cannot kill target cells as efficiently within 24 hours.

[0648] Results of transducing 6 independent T cell samples from separate healthy donors showed that the D330A mutant (mut) is more sensitive to AP1903 than the wild type Caspase-9 polypeptide.

[0649] FIG. 57 shows the average IC₅₀, range and standard deviation from the 6 healthy donors shown in FIG. 56. This data shows that the improvement is statistically significant. The iCasp9-D330A mutant demonstrated improved AP1903-dependent cytotoxicity in transduced T cells. Primary T cells from healthy donors (n=6) were transduced with retrovirus encoding mutant or wild-type iCasp9 or iCasp9-D330A, and the ΔCD19 cell surface marker. Following transduction, iCasp9-transduced T cells were purified using CD19-microbeads and a magnetic column. T cells were then exposed to AP1903 (0-100 nM) and measured for CD3⁺CD19⁺ T cells by flow cytometry after 24 hours. The IC₅₀ of iCasp9-D330A was significantly lower (p=0.002) than wild-type iCasp9. Results of several D330 mutants, revealed that all six D330 mutants tested (D330A, E, N, V, G, and S) are more sensitive to AP1903 than wild type Caspase-9 polypeptide.

[0650] The N405Q mutant along with other dimerization domain mutants, including N404Y and N406Y, can kill target T cells indistinguishable from wild type Caspase-9 polypeptide or D330A within 10 days. Cells that received AP1903 at Day 0 received a second dose of AP1903 at day 4. This data supports the use of reduced sensitivity Caspase-9 mutants, like N405Q as part of a regulated efficacy switch.

[0651] The results of codon optimization of N405Q caspase polypeptide, called “N405Qco”, revealed that codon optimization, likely leading to an increase in expression only has a very subtle effect on inducible caspase function. This likely reflects the use of common codons in the original Caspase-9 gene.

[0652] The Caspase-9 polypeptide has a dose-response curve in vivo, which could be used to eliminate a variable fraction of T cells expressing the Caspase-9 polypeptide. The data also shows that a dose of 0.5 mg/kg AP1903 is sufficient to eliminate most modified T cells in vivo. AP1903 dose-dependent elimination in vivo of T cells transduced with D330E iCasp9 was assayed. T cells were transduced with SFG-iCasp9-D330E-2A-ΔCD19 retrovirus and injected i.v. into immune deficient mice (NSG). After 24 hours, mice were injected i.p. with AP1903 (0-5 mg/kg). After an additional 24 hours, mice were sacrificed and lymphocytes from the spleen (A) were isolated and analyzed by flow cytometry for the frequency of human CD3⁺CD19⁺ T cells. This shows that iCasp9-D330E demonstrates a similar in vivo cytotoxicity profile in response to AP1903 as wild-type iCasp9.

[0653] Conclusions: As discussed, from this analysis of 78 mutants so far, out of the single mutant mutations, the D330 mutations combine somewhat improved efficacy with slightly reduced basal activity. N405Q mutants are also attractive since they have very low basal activity with only slightly decreased efficacy, reflected by a 4-5-fold increase in IC₅₀. Experiments in primary T cells have shown that N405Q mutants can effectively kill target cells, but with somewhat slower kinetics than D330 mutants, making this potentially very useful for a graduated suicide switch that kills partially after an initial dose of AP1903, and up to full killing can be achieved upon a second dose of AP1903.

[0654] The following table provides a summary of basal activity and IC₅₀ for various chimeric modified Caspase-9 polypeptides prepared and assayed according to the methods discussed herein. The results are based on a minimum of two independent SEAP assays, except for a subset (i.e., A316G, T317E, F326K, D327G, D327K, D327R, Q328K, Q328R, L329G, L329K, A331K, S196A, S196D, and the following double mutants: D330A with S144A, S144D, or S183A; and N405Q with S144A, S144D, S196D, or T317S) that were tested once. Four multi-pronged approaches were taken to generate the tested chimeric modified Caspase-9 polypeptides. “Dead” modified Caspase-9 polypeptides were no longer responsive to AP1903. Double mutants are indicated by a hyphen, for example, D330A-N405Q denotes a modified Caspase-9 polypeptide having a substitution at position 330 and a substitution at position 405.

TABLE 5
Caspase Mutant Classes

| | | Cleavage sites | | | |
|---|---|---|---|---|---|
| | Homodimerization | & XIAP | | Double | Total |
| Basal Activity | domain | Interaction | Phosphorylation | mutants, Misc. | mutants |
| Decreased | | | S144A | | 80 |
| basal and | | | S144D | | *, predicted |
| similar IC₅₀ | | T317S | S196D | | |
| Decreased | N405Q | D330A | S183A | D330A-N405Q | Bold, Tested |
| basal but | | | | | in T cells |
| higher IC₅₀ | ⁴⁰²GCFNF⁴⁰⁶ISAQT (Casp-10) | D330E | S195A | D330A-S144A | |
| | (SEQ ID NOS 297 and 303) | | | | |
| | F404Y | D330G | S196A | D330A-S144D | |
| | F406A | D330N | | D330A-S183A | |
| | F406W | D330S | | D330A-S196A | |
| | F406Y | D330V | | N405Q-S144A | |
| | N405Qco | L329E | | N405Q-S144D | |
| | | T317A | | N405Q-S196D | |
| | | | | N405Q-T317S | |
| | | | | *N405Q-S144Aco | |
| | | | | *N405Q-T317Sco | |
| Decreased | F404T | D315A | Y153A | | |
| basal but | F404W | A316G | Y153F | | |
| much higher | N405F | F319W | S307A | | |
| IC₅₀ | F406T | | | | |
| Similar basal | C403A | ³¹⁶ATPF³¹⁹AVPI | | | |
| and IC₅₀ | | (SMAC/Diablo) | | | |
| | | (SEQ ID NOS 299 and 304) | | | |
| | C403S | T317C | | | |
| | C403T | P318A | | | |
| | N405A | F319A | | | |
| Increased | N405T | T317E | | D330A-N405T | |
| basal | | F326K | | | |
| | | D327G | | | |
| | | D327K | | | |
| | | D327R | | | |
| | | Q328K | | | |
| | | Q328R | | | |
| | | L329G | | | |
| | | L329K | | | |
| | | A331K | | | |
| Catalytically | ⁴⁰²GCFNF⁴⁰⁶AAAAA | | | C285A | |
| dead | (SEQ ID NOS 297 and 302) | | | | |
| | ⁴⁰²GCFNF⁴⁰⁶YCSTL (Casp-2) | | | D315A-D330A | |
| | (SEQ ID NOS 297 and 305) | | | | |
| | ⁴⁰²GCFNF⁴⁰⁶CIVSM (Casp-3) | | | D330A-Y153A | |
| | (SEQ ID NOS 297 and 306) | | | | |
| | ⁴⁰²GCFNF⁴⁰⁶QPTFT (Casp-8) | | | D330A-Y153F | |
| | (SEQ ID NOS 297 and 307) | | | | |
| | G402A | | | D330A-T317E | |
| | G402I | | | | |
| | G402Q | | | | |
| | G402Y | | | | |
| | C403P | | | | |
| | F404A | | | | |
| | F404S | | | | |
| | F406L | | | | |

### LITERATURE REFERENCES CITED IN EXAMPLES 6-9

[0655] 1. Seifert, R. and K. Wenzel-Seifert, Constitutive activity of G-protein-coupled receptors: cause of disease and common property of wild-type receptors. Naunyn Schmiedebergs Arch Pharmacol, 2002. 366(5): p. 381-416.
[0656] 2. Roose, J. P., et al., T cell receptor-independent basal signaling via Erk and Abl kinases suppresses RAG gene expression. PLoS Biol, 2003. 1(2): p. E53.
[0657] 3. Tze, L. E., et al., Basal immunoglobulin signaling actively maintains developmental stage in immature B cells. PLoS Biol, 2005. 3(3): p. e82.
[0658] 4. Schram, B. R., et al., B cell receptor basal signaling regulates antigen-induced Ig light chain rearrangements. J Immunol, 2008. 180(7): p. 4728-41.
[0659] 5. Randall, K. L., et al., Dock8 mutations cripple B cell immunological synapses, germinal centers and long-lived antibody production. Nat Immunol, 2009. 10(12): p. 1283-91.
[0660] 6. Kouskoff, V., et al., B cell receptor expression level determines the fate of developing B lymphocytes: receptor editing versus selection. Proc Natl Acad Sci USA, 2000. 97(13): p. 7435-9.
[0661] 7. Hong, T., et al., A simple theoretical framework for understanding heterogeneous differentiation of CD4+ T cells. BMC Syst Biol, 2012. 6: p. 66.
[0662] 8. Rudd, M. L., A. Tua-Smith, and D. B. Straus, Lck SH3 domain function is required for T-cell receptor signals regulating thymocyte development. Mol Cell Biol, 2006. 26(21): p. 7892-900.
[0663] 9. Sorkin, A. and M. von Zastrow, Endocytosis and signalling: intertwining molecular networks. Nat Rev Mol Cell Biol, 2009. 10(9): p. 609-22.
[0664] 10. Luning Prak, E. T., M. Monestier, and R. A. Eisenberg, B cell receptor editing in tolerance and autoimmunity. Ann N Y Acad Sci, 2011. 1217: p. 96-121.
[0665] 11. Boss, W. F., et al., Basal signaling regulates plant growth and development. Plant Physiol, 2010. 154(2): p. 439-43.
[0666] 12. Tao, Y. X., Constitutive activation of G protein-coupled receptors and diseases: insights into mechanisms of activation and therapeutics. Pharmacol Ther, 2008. 120(2): p. 129-48.
[0667] 13. Spiegel, A. M., Defects in G protein-coupled signal transduction in human disease. Annu Rev Physiol, 1996. 58: p. 143-70.
[0668] 14. Shiozaki, E. N., et al., Mechanism of XIAP-mediated inhibition of Caspase-9. Mol Cell, 2003. 11(2): p. 519-27.
[0669] 15. Renatus, M., et al., Dimer formation drives the activation of the cell death protease Caspase-9. Proc Natl Acad Sci USA, 2001. 98(25): p. 14250-5.
[0670] 16. Shi, Y., Mechanisms of Caspase activation and inhibition during apoptosis. Mol Cell, 2002. 9(3): p. 459-70.
[0671] 17. Shiozaki, E. N., J. Chai, and Y. Shi, Oligomerization and activation of Caspase-9, induced by Apaf-1 CARD. Proc Natl Acad Sci USA, 2002. 99(7): p. 4197-202.
[0672] 18. Straathof, K. C., et al., An inducible Caspase-9 safety switch for T-cell therapy. Blood, 2005. 105(11): p. 4247-54.
[0673] 19. MacCorkle, R. A., K. W. Freeman, and D. M. Spencer, Synthetic activation of Caspases: artificial death switches. Proc Natl Acad Sci USA, 1998. 95(7): p. 3655-60.
[0674] 20. Di Stasi, A., et al., Inducible apoptosis as a safety switch for adoptive cell therapy. N Engl J Med, 2011. 365(18): p. 1673-83.
[0675] 21. Chang, W. C., et al., Modifying ligand-induced and constitutive signaling of the human 5-HT4 receptor. PLoS One, 2007. 2(12): p. e1317.
[0676] 22. Bloom, J. D. and F. H. Arnold, In the light of directed evolution: pathways of adaptive protein evolution. Proc Natl Acad Sci USA, 2009. 106 Suppl 1: p. 9995-10000.
[0677] 23. Boatright, K. M. and G. S. Salvesen, Mechanisms of Caspase activation. Curr Opin Cell Biol, 2003. 15(6): p. 725-31.
[0678] 24. Boatright, K. M., et al., A unified model for apical Caspase activation. Mol Cell, 2003. 11(2): p. 529-41.
[0679] 25. Chao, Y., et al., Engineering a dimeric Caspase-9: a re-evaluation of the induced proximity model for Caspase activation. PLoS Biol, 2005. 3(6): p. e183.
[0680] 26. Stennicke, H. R., et al., Caspase-9 can be activated without proteolytic processing. J Biol Chem, 1999. 274(13): p. 8359-62.
[0681] 27. Brady, S. C., L. A. Allan, and P. R. Clarke, Regulation of Caspase-9 through phosphorylation by protein kinase C zeta in response to hyperosmotic stress. Mol Cell Biol, 2005. 25(23): p. 10543-55.
[0682] 28. Martin, M. C., et al., Protein kinase A regulates Caspase-9 activation by Apaf-1 downstream of cytochrome c. J Biol Chem, 2005. 280(15): p. 15449-55.
[0683] 29. Cardone, M. H., et al., Regulation of cell death protease Caspase-9 by phosphorylation. Science, 1998. 282(5392): p. 1318-21.
[0684] 30. Raina, D., et al., c-Abl tyrosine kinase regulates Caspase-9 autocleavage in the apoptotic response to DNA damage. J Biol Chem, 2005. 280(12): p. 11147-51.
[0685] 31. Papworth, C., Bauer, J. C., Braman, J. and Wright, D. A., Site-directed mutagenesis in one day with >80% efficiency. Strategies, 1996. 9(3): p. 3-4.
[0686] 32. Spencer, D. M., et al., Functional analysis of Fas signaling in vivo using synthetic inducers of dimerization. Curr Biol, 1996. 6(7): p. 839-47.
[0687] 33. Hsiao, E. C., et al., Constitutive Gs activation using a single-construct tetracycline-inducible expression system in embryonic stem cells and mice. Stem Cell Res Ther, 2011. 2(2): p. 11.
[0688] 34. Waldner, C., et al., Double conditional human embryonic kidney cell line based on FLP and PhiC31 mediated transgene integration. BMC Res Notes, 2011. 4: p. 420.

[0689] The chimeric caspase polypeptides may include amino acid substitutions, including amino acid substitutions that result in a caspase polypeptide with lower basal activity. These may include, for example, iCasp9 D330A, iCasp9 N405Q, and iCasp9 D330A N405Q, demonstrated low to undetectable basal activity, respectively, with a minimum deleterious effect on their AP1903 IC₅₀ in a SEAP reporter-based, surrogate killing assay.

### Example 10: Examples of Particular Nucleic Acid and Amino Acid Sequences

[0690] The following is nucleotide sequences provide an example of a construct that may be used for expression of the chimeric protein and CD19 marker. The figure presents the SFG.iC9.2A. ²CD19.gcs construct

SEQ ID NO: 1, nucleotide sequence of 5′LTR sequence
TGAAAGACCCCACCTGTAGGTTTGGCAAGCTAGCTTAAGTAACGCCATTTTGCAAGGCATGGA
AAAATACATAACTGAGAATAGAAAAGTTCAGATCAAGGTCAGGAACAGATGGAACAGCTGAAT
ATGGGCCAAACAGGATATCTGTGGTAAGCAGTTCCTGCCCCGGCTCAGGGCCAAGAACAGAT
GGAACAGCTGAATATGGGCCAAACAGGATATCTGTGGTAAGCAGTTCCTGCCCCGGCTCAGG
GCCAAGAACAGATGGTCCCCAGATGCGGTCCAGCCCTCAGCAGTTTCTAGAGAACCATCAGA
TGTTTCCAGGGTGCCCCAAGGACCTGAAATGACCCTGTGCCTTATTTGAACTAACCAATCAGT
TCGCTTCTCGCTTCTGTTCGCGCGCTTATGCTCCCCGAGCTCAATAAAAGAGCCCACAACCC
CTCACTCGGGGCGCCAGTCCTCCGATTGACTGAGTCGCCCGGGTACCCGTGTATCCAATAAA
CCCTCTTGCAGTTGCATCCGACTTGTGGTCTCGCTGTTCCTTGGGAGGGTCTCCTCTGAGTG
ATTGACTACCCGTCAGCGGGGGTCTTTCA
SEQ ID NO: 2, nucleotide sequence of Fᵥ (human FKBP12v36)
GGAGTGCAGGTGGAAACCATCTCCCCAGGAGACGGGCGCACCTTCCCCAAGCGCGGCCAGA
CCTGCGTGGTGCACTACACCGGGATGCTTGAAGATGGAAAGAAAGTTGATTCCTCCCGGGAC
AGAAACAAGCCCTTTAAGTTTATGCTAGGCAAGCAGGAGGTGATCCGAGGCTGGGAAGAAGG
GGTTGCCCAGATGAGTGTGGGTCAGAGAGCCAAACTGACTATATCTCCAGATTATGCCTATG
GTGCCACTGGGCACCCAGGCATCATCCCACCACATGCCACTCTCGTCTTCGATGTGGAGCTT
CTAAAACTGGAA
SEQ ID NO: 3 amino acid sequence of Fv (human FKBP12v36)
G V Q V E T I S P G D G R T F P K R G Q T C V V H Y T G M L E D G K K
V D S S R D R N K P F K F M L G K Q E V I R G W E E G V A Q M S V G Q
R A K L T I S P D Y A Y G A T G H P G I I P P H A T L V F D V E L L K L E
SEQ ID NO: 4, GS linker (SEQ ID NO: 151) nucleotide sequence
TCTGGCGGTGGATCCGGA
SEQ ID NO: 5, GS linker (SEQ ID NO: 151) amino acid sequence
S G G G S G
SEQ ID NO: 6, linker nucleotide sequence (between GS linker (SEQ ID NO: 151) and Casp 9)
GTCGAC
SEQ ID NO: 7, linker amino acid sequence (between GS linker (SEQ ID NO: 151) and Casp 9)
VD
SEQ ID NO: 8, Casp 9 (truncated) nucleotide sequence
GGATTTGGTGATGTCGGTGCTCTTGAGAGTTTGAGGGGAAATGCAGATTTGGCTTACATCCTG
AGCATGGAGCCCTGTGGCCACTGCCTCATTATCAACAATGTGAACTTCTGCCGTGAGTCCGG
GCTCCGCACCCGCACTGGCTCCAACATCGACTGTGAGAAGTTGCGGCGTCGCTTCTCCTCGC
TGCATTTCATGGTGGAGGTGAAGGGCGACCTGACTGCCAAGAAAATGGTGCTGGCTTTGCTG
GAGCTGGCGCAGCAGGACCACGGTGCTCTGGACTGCTGCGTGGTGGTCATTCTCTCTCACG
GCTGTCAGGCCAGCCACCTGCAGTTCCCAGGGGCTGTCTACGGCACAGATGGATGCCCTGT
GTCGGTCGAGAAGATTGTGAACATCTTCAATGGGACCAGCTGCCCCAGCCTGGGAGGGAAG
CCCAAGCTCTTTTTCATCCAGGCCTGTGGTGGGGAGCAGAAAGACCATGGGTTTGAGGTGGC
CTCCACTTCCCCTGAAGACGAGTCCCCTGGCAGTAACCCCGAGCCAGATGCCACCCCGTTCC
AGGAAGGTTTGAGGACCTTCGACCAGCTGGACGCCATATCTAGTTTGCCCACACCCAGTGAC
ATCTTTGTGTCCTACTCTACTTTCCCAGGTTTTGTTTCCTGGAGGGACCCCAAGAGTGGCTCC
TGGTACGTTGAGACCCTGGACGACATCTTTGAGCAGTGGGCTCACTCTGAAGACCTGCAGTC
CCTCCTGCTTAGGGTCGCTAATGCTGTTTCGGTGAAAGGGATTTATAAACAGATGCCTGGTTG
CTTTAATTTCCTCCGGAAAAAACTTTTCTTTAAAACATCA
SEQ ID NO: 9, Caspase-9 (truncated) amino acid sequence-CARD domain deleted
G F G D V G A L E S L R G N A D L A Y I L S M E P C G H C L I I N N V N
F C R E S G L R T R T G S N I D C E K L R R R F S S L H F M V E V K G D
L T A K K M V L A L L E L A Q Q D H G A L D C C V V V I L S H G C Q A S
H L Q F P G A V Y G T D G C P V S V E K I V N I F N G T S C P S L G G K
P K L F F I Q A C G G E Q K D H G F E V A S T S P E D E S P G S N P E P
D A T P F Q E G L R T F D Q L D A I S S L P T P S D I F V S Y S T F P G
F V S W R D P K S G S W Y V E T L D D I F E Q W A H S E D L Q S L L L
R V A N A V S V K G I Y K Q M P G C F N F L R K K L F F K T S
SEQ ID NO: 10, linker nucleotide sequence (between Caspase-9 and 2A)
GCTAGCAGA
SEQ ID NO: 11, linker amino acid sequence (between Caspase-9 and 2A)
ASR
SEQ ID NO: 12, Thosea asigna virus-2A from capsid protein precursor nucleotide sequence
GCCGAGGGCAGGGGAAGTCTTCTAACATGCGGGGACGTGGAGGAAAATCCCGGGCCC
SEQ ID NO: 13, Thosea asigna virus-2A from capsid protein precursor amino acid sequence
A E G R G S L L T C G D V E E N P G P
SEQ ID NO: 14, human CD19 (Δ cytoplasmic domain) nucleotide sequence (transmembrane
domain in bold)
ATGCCACCTCCTCGCCTCCTCTTCTTCCTCCTCTTCCTCACCCCCATGGAAGTCAGGCCCGA
GGAACCTCTAGTGGTGAAGGTGGAAGAGGGAGATAACGCTGTGCTGCAGTGCCTCAAGGGG
ACCTCAGATGGCCCCACTCAGCAGCTGACCTGGTCTCGGGAGTCCCCGCTTAAACCCTTCTT
AAAACTCAGCCTGGGGCTGCCAGGCCTGGGAATCCACATGAGGCCCCTGGCCATCTGGCTT
TTCATCTTCAACGTCTCTCAACAGATGGGGGGCTTCTACCTGTGCCAGCCGGGGCCCCCCTC
TGAGAAGGCCTGGCAGCCTGGCTGGACAGTCAATGTGGAGGGCAGCGGGGAGCTGTTCCG
GTGGAATGTTTCGGACCTAGGTGGCCTGGGCTGTGGCCTGAAGAACAGGTCCTCAGAGGGC
CCCAGCTCCCCTTCCGGGAAGCTCATGAGCCCCAAGCTGTATGTGTGGGCCAAAGACCGCC
CTGAGATCTGGGAGGGAGAGCCTCCGTGTCTCCCACCGAGGGACAGCCTGAACCAGAGCCT
CAGCCAGGACCTCACCATGGCCCCTGGCTCCACACTCTGGCTGTCCTGTGGGGTACCCCCT
GACTCTGTGTCCAGGGGCCCCCTCTCCTGGACCCATGTGCACCCCAAGGGGCCTAAGTCATT
GCTGAGCCTAGAGCTGAAGGACGATCGCCCGGCCAGAGATATGTGGGTAATGGAGACGGGT
CTGTTGTTGCCCCGGGCCACAGCTCAAGACGCTGGAAAGTATTATTGTCACCGTGGCAACCT
GACCATGTCATTCCACCTGGAGATCACTGCTCGGCCAGTACTATGGCACTGGCTGCTGAGGA
CTGGTGGCTGGAAGGTCTCAGCTGTGACTTTGGCTTATCTGATCTTCTGCCTGTGTTCCCTTG
TGGGCATTCTTCATCTTCAAAGAGCCCTGGTCCTGAGGAGGAAAAGAAAGCGAATGACTGAC
CCCACCAGGAGATTC
SEQ ID NO: 15, human CD19 (Δ cytoplasmic domain) amino acid sequence
M P P P R L L F F L L F L T P M E V R P E E P L V V K V E E G D N A V L
Q C L K G T S D G P T Q Q L T W S R E S P L K P F L K L S L G L P G L G
I H M R P L A I W L F I F N V S Q Q M G G F Y L C Q P G P P S E K A W Q
P G W T V N V E G S G E L F R W N V S D L G G L G C G L K N R S S E G
P S S P S G K L M S P K L Y V W A K D R P E I W E G E P P C L P P R D
S L N Q S L S Q D L T M A P G S T L W L S C G V P P D S V S R G P L S
W T H V H P K G P K S L L S L E L K D D R P A R D M W V M E T G L L L
P R A T A Q D A G K Y Y C H R G N L T M S F H L E I T A R P V L W H W
L L R T G G W K V S A V T L A Y L I F C L C S L V G I L H L Q R A L V L R
R K R K R M T D P T R R F
SEQ ID NO: 16, 3′LTR nucleotide sequence
TGAAAGACCCCACCTGTAGGTTTGGCAAGCTAGCTTAAGTAACGCCATTTTGCAAGGCATGGA
AAAATACATAACTGAGAATAGAGAAGTTCAGATCAAGGTCAGGAACAGATGGAACAGCTGAAT
ATGGGCCAAACAGGATATCTGTGGTAAGCAGTTCCTGCCCCGGCTCAGGGCCAAGAACAGAT
GGAACAGCTGAATATGGGCCAAACAGGATATCTGTGGTAAGCAGTTCCTGCCCCGGCTCAGG
GCCAAGAACAGATGGTCCCCAGATGCGGTCCAGCCCTCAGCAGTTTCTAGAGAACCATCAGA
TGTTTCCAGGGTGCCCCAAGGACCTGAAATGACCCTGTGCCTTATTTGAACTAACCAATCAGT
TCGCTTCTGCTTCTGTTCGCCGCGCTTCTGCTCCCCGACGCTCAATAAAAGAGCCCACAACCC
CTCACTCGGGGCGCCAGTCCTCCGATTGACTGAGTCGCCCGGGTACCCGTGTATCCAATAAA
CCCTCTTGCAGTTGCATCCGACTTGTGGTCTCGCTGTTCCTTGGGAGGGTCTCCTCTGAGTG
ATTGACTACCCGTCAGCGGGGGTCTTTCA
SEQ ID NO: 17, Expression vector construct nucleotide sequence-nucleotide sequence coding
for the chimeric protein and 5′ and 3′ LTR sequences, and additional vector sequence.
TGAAAGACCCCACCTGTAGGTTTGGCAAGCTAGCTTAAGTAACGCCATTTTGCAAGGCATGGA
AAAATACATAACTGAGAATAGAAAAGTTCAGATCAAGGTCAGGAACAGATGGAACAGCTGAAT
ATGGGCCAAACAGGATATCTGTGGTAAGCAGTTCCTGCCCCGGCTCAGGGCCAAGAACAGAT
GGAACAGCTGAATATGGGCCAAACAGGATATCTGTGGTAAGCAGTTCCTGCCCCGGCTCAGG
GCCAAGAACAGATGGTCCCCAGATGCGGTCCAGCCCTCAGCAGTTTCTAGAGAACCATCAGA
TGTTTCCAGGGTGCCCCAAGGACCTGAAATGACCCTGTGCCTTATTTGAACTAACCAATCAGT
TCGCTTCTCGCTTCTGTTCGCGCGCTTATGCTCCCCGAGCTCAATAAAAGAGCCCACAACCC
CTCACTCGGGGCGCCAGTCCTCCGATTGACTGAGTCGCCCGGGTACCCGTGTATCCAATAAA
CCCTCTTGCAGTTGCATCCGACTTGTGGTCTCGCTGTTCCTTGGGAGGGTCTCCTCTGAGTG
ATTGACTACCCGTCAGCGGGGGTCTTTCATTTGGGGGCTCGTCCGGGATCGGGAGACCCCT
GCCCAGGGACCACCGACCCACCACCGGGAGGTAAGCTGGCCAGCAACTTATCTGTGTCTGT
CCGATTGTCTAGTGTCTATGACTGATTTTATGCGCCTGCGTCGGTACTAGTTAGCTAACTAGC
TCTGTATCTGGCGGACCCGTGGTGGAACTGACGAGTTCGGAACACCCGGCCGCAACCCTGG
GAGACGTCCCAGGGACTTCGGGGGCCGTTTTTGTGGCCCGACCTGAGTCCTAAAATCCCGAT
CGTTTAGGACTCTTTGGTGCACCCCCCTTAGAGGAGGGATATGTGGTTCTGGTAGGAGACGA
GAACCTAAAACAGTTCCCGCCTCCGTCTGAATTTTTGCTTTCGGTTTGGGACCGAAGCCGCG
CCGCGCGTCTTGTCTGCTGCAGCATCGTTCTGTGTTGTCTCTGTCTGACTGTGTTTCTGTATTT
GTCTGAAAATATGGGCCCGGGCTAGCCTGTTACCACTCCCTTAAGTTTGACCTTAGGTCACTG
GAAAGATGTCGAGCGGATCGCTCACAACCAGTCGGTAGATGTCAAGAAGAGACGTTGGGTTA
CCTTCTGCTCTGCAGAATGGCCAACCTTTAACGTCGGATGGCCGCGAGACGGCACCTTTAAC
CGAGACCTCATCACCCAGGTTAAGATCAAGGTCTTTTCACCTGGCCCGCATGGACACCCAGA
CCAGGTGGGGTACATCGTGACCTGGGAAGCCTTGGCTTTTGACCCCCCTCCCTGGGTCAAG
CCCTTTGTACACCCTAAGCCTCCGCCTCCTCTTCCTCCATCCGCCCCGTCTCTCCCCCTTGAA
CCTCCTCGTTCGACCCCGCCTCGATCCTCCCTTTATCCAGCCCTCACTCCTTCTCTAGGCGCC
CCCATATGGCCATATGAGATCTTATATGGGGCACCCCCGCCCCTTGTAAACTTCCCTGACCCT
GACATGACAAGAGTTACTAACAGCCCCTCTCTCCAAGCTCACTTACAGGCTCTCTACTTAGTC
CAGCACGAAGTCTGGAGACCTCTGGCGGCAGCCTACCAAGAACAACTGGACCGACCGGTGG
TACCTCACCCTTACCGAGTCGGCGACACAGTGTGGGTCCGCCGACACCAGACTAAGAACCTA
GAACCTCGCTGGAAAGGACCTTACACAGTCCTGCTGACCACCCCCACCGCCCTCAAAGTAGA
CGGCATCGCAGCTTGGATACACGCCGCCCACGTGAAGGCTGCCGACCCCGGGGGTGGACC
ATCCTCTAGACTGCCATGCTCGAGGGAGTGCAGGTGGAAACCATCTCCCCAGGAGACGGGC
GCACCTTCCCCAAGCGCGGCCAGACCTGCGTGGTGCACTACACCGGGATGCTTGAAGATGG
AAAGAAAGTTGATTCCTCCCGGGACAGAAACAAGCCCTTTAAGTTTATGCTAGGCAAGCAGGA
GGTGATCCGAGGCTGGGAAGAAGGGGTTGCCCAGATGAGTGTGGGTCAGAGAGCCAAACTG
ACTATATCTCCAGATTATGCCTATGGTGCCACTGGGCACCCAGGCATCATCCCACCACATGCC
ACTCTCGTCTTCGATGTGGAGCTTCTAAAACTGGAATCTGGCGGTGGATCCGGAGTCGACGG
ATTTGGTGATGTCGGTGCTCTTGAGAGTTTGAGGGGAAATGCAGATTTGGCTTACATCCTGAG
CATGGAGCCCTGTGGCCACTGCCTCATTATCAACAATGTGAACTTCTGCCGTGAGTCCGGGC
TCCGCACCCGCACTGGCTCCAACATCGACTGTGAGAAGTTGCGGCGTCGCTTCTCCTCGCTG
CATTTCATGGTGGAGGTGAAGGGCGACCTGACTGCCAAGAAAATGGTGCTGGCTTTGCTGGA
GCTGGCGCAGCAGGACCACGGTGCTCTGGACTGCTGCGTGGTGGTCATTCTCTCTCACGGC
TGTCAGGCCAGCCACCTGCAGTTCCCAGGGGCTGTCTACGGCACAGATGGATGCCCTGTGT
CGGTCGAGAAGATTGTGAACATCTTCAATGGGACCAGCTGCCCCAGCCTGGGAGGGAAGCC
CAAGCTCTTTTTCATCCAGGCCTGTGGTGGGGAGCAGAAAGACCATGGGTTTGAGGTGGCCT
CCACTTCCCCTGAAGACGAGTCCCCTGGCAGTAACCCCGAGCCAGATGCCACCCCGTTCCA
GGAAGGTTTGAGGACCTTCGACCAGCTGGACGCCATATCTAGTTTGCCCACACCCAGTGACA
TCTTTGTGTCCTACTCTACTTTCCCAGGTTTTGTTTCCTGGAGGGACCCCAAGAGTGGCTCCT
GGTACGTTGAGACCCTGGACGACATCTTTGAGCAGTGGGCTCACTCTGAAGACCTGCAGTCC
CTCCTGCTTAGGGTCGCTAATGCTGTTTCGGTGAAAGGGATTTATAAACAGATGCCTGGTTGC
TTTAATTTCCTCCGGAAAAAACTTTTCTTTAAAACATCAGCTAGCAGAGCCGAGGGCAGGGGA
AGTCTTCTAACATGCGGGGACGTGGAGGAAAATCCCGGGCCCATGCCACCTCCTCGCCTCCT
CTTCTTCCTCCTCTTCCTCACCCCCATGGAAGTCAGGCCCGAGGAACCTCTAGTGGTGAAGG
TGGAAGAGGGAGATAACGCTGTGCTGCAGTGCCTCAAGGGGACCTCAGATGGCCCCACTCA
GCAGCTGACCTGGTCTCGGGAGTCCCCGCTTAAACCCTTCTTAAAACTCAGCCTGGGGCTGC
CAGGCCTGGGAATCCACATGAGGCCCCTGGCCATCTGGCTTTTCATCTTCAACGTCTCTCAA
CAGATGGGGGGCTTCTACCTGTGCCAGCCGGGGCCCCCCTCTGAGAAGGCCTGGCAGCCTG
GCTGGACAGTCAATGTGGAGGGCAGCGGGGAGCTGTTCCGGTGGAATGTTTCGGACCTAGG
TGGCCTGGGCTGTGGCCTGAAGAACAGGTCCTCAGAGGGCCCCAGCTCCCCTTCCGGGAAG
CTCATGAGCCCCAAGCTGTATGTGTGGGCCAAAGACCGCCCTGAGATCTGGGAGGGAGAGC
CTCCGTGTCTCCCACCGAGGGACAGCCTGAACCAGAGCCTCAGCCAGGACCTCACCATGGC
CCCTGGCTCCACACTCTGGCTGTCCTGTGGGGTACCCCCTGACTCTGTGTCCAGGGGCCCC
CTCTCCTGGACCCATGTGCACCCCAAGGGGCCTAAGTCATTGCTGAGCCTAGAGCTGAAGGA
CGATCGCCCGGCCAGAGATATGTGGGTAATGGAGACGGGTCTGTTGTTGCCCCGGGCCACA
GCTCAAGACGCTGGAAAGTATTATTGTCACCGTGGCAACCTGACCATGTCATTCCACCTGGA
GATCACTGCTCGGCCAGTACTATGGCACTGGCTGCTGAGGACTGGTGGCTGGAAGGTCTCA
GCTGTGACTTTGGCTTATCTGATCTTCTGCCTGTGTTCCCTTGTGGGCATTCTTCATCTTCAAA
GAGCCCTGGTCCTGAGGAGGAAAAGAAAGCGAATGACTGACCCCACCAGGAGATTCTAACG
CGTCATCATCGATCCGGATTAGTCCAATTTGTTAAAGACAGGATATCAGTGGTCCAGGCTCTA
GTTTTGACTCAACAATATCACCAGCTGAAGCCTATAGAGTACGAGCCATAGATAAAATAAAAG
ATTTTATTTAGTCTCCAGAAAAAGGGGGGAATGAAAGACCCCACCTGTAGGTTTGGCAAGCTA
GCTTAAGTAACGCCATTTTGCAAGGCATGGAAAAATACATAACTGAGAATAGAGAAGTTCAGA
TCAAGGTCAGGAACAGATGGAACAGCTGAATATGGGCCAAACAGGATATCTGTGGTAAGCAG
TTCCTGCCCCGGCTCAGGGCCAAGAACAGATGGAACAGCTGAATATGGGCCAAACAGGATAT
CTGTGGTAAGCAGTTCCTGCCCCGGCTCAGGGCCAAGAACAGATGGTCCCCAGATGCGGTC
CAGCCCTCAGCAGTTTCTAGAGAACCATCAGATGTTTCCAGGGTGCCCCAAGGACCTGAAAT
GACCCTGTGCCTTATTTGAACTAACCAATCAGTTCGCTTCTCGCTTCTGTTCGCGCGCTTCTG
CTCCCCGAGCTCAATAAAAGAGCCCACAACCCCTCACTCGGGGCGCCAGTCCTCCGATTGAC
TGAGTCGCCCGGGTACCCGTGTATCCAATAAACCCTCTTGCAGTTGCATCCGACTTGTGGTCT
CGCTGTTCCTTGGGAGGGTCTCCTCTGAGTGATTGACTACCCGTCAGCGGGGGTCTTTCACA
CATGCAGCATGTATCAAAATTAATTTGGTTTTTTTTCTTAAGTATTTACATTAAATGGCCATAGT
ACTTAAAGTTACATTGGCTTCCTTGAAATAAACATGGAGTATTCAGAATGTGTCATAAATATTTC
TAATTTTAAGATAGTATCTCCATTGGCTTTCTACTTTTTCTTTTATTTTTTTTTGTCCTCTGTCTT
CCATTTGTTGTTGTTGTTGTTTGTTTGTTTGTTTGTTGGTTGGTTGGTTAATTTTTTTTTAAAGAT
CCTACACTATAGTTCAAGCTAGACTATTAGCTACTCTGTAACCCAGGGTGACCTTGAAGTCAT
GGGTAGCCTGCTGTTTTAGCCTTCCCACATCTAAGATTACAGGTATGAGCTATCATTTTTGGTA
TATTGATTGATTGATTGATTGATGTGTGTGTGTGTGATTGTGTTTGTGTGTGTGACTGTGAAAA
TGTGTGTATGGGTGTGTGTGAATGTGTGTATGTATGTGTGTGTGTGAGTGTGTGTGTGTGTGT
GTGCATGTGTGTGTGTGTGACTGTGTCTATGTGTATGACTGTGTGTGTGTGTGTGTGTGTGTG
TGTGTGTGTGTGTGTGTGTGTGTTGTGAAAAAATATTCTATGGTAGTGAGAGCCAACGCTCCG
GCTCAGGTGTCAGGTTGGTTTTTGAGACAGAGTCTTTCACTTAGCTTGGAATTCACTGGCCGT
CGTTTTACAACGTCGTGACTGGGAAAACCCTGGCGTTACCCAACTTAATCGCCTTGCAGCACA
TCCCCCTTTCGCCAGCTGGCGTAATAGCGAAGAGGCCCGCACCGATCGCCCTTCCCAACAGT
TGCGCAGCCTGAATGGCGAATGGCGCCTGATGCGGTATTTTCTCCTTACGCATCTGTGCGGT
ATTTCACACCGCATATGGTGCACTCTCAGTACAATCTGCTCTGATGCCGCATAGTTAAGCCAG
CCCCGACACCCGCCAACACCCGCTGACGCGCCCTGACGGGCTTGTCTGCTCCCGGCATCCG
CTTACAGACAAGCTGTGACCGTCTCCGGGAGCTGCATGTGTCAGAGGTTTTCACCGTCATCA
CCGAAACGCGCGATGACGAAAGGGCCTCGTGATACGCCTATTTTTATAGGTTAATGTCATGAT
AATAATGGTTTCTTAGACGTCAGGTGGCACTTTTCGGGGAAATGTGCGCGGAACCCCTATTTG
TTTATTTTTCTAAATACATTCAAATATGTATCCGCTCATGAGACAATAACCCTGATAAATGCTTC
AATAATATTGAAAAAGGAAGAGTATGAGTATTCAACATTTCCGTGTCGCCCTTATTCCCTTTTTT
GCGGCATTTTGCCTTCCTGTTTTTGCTCACCCAGAAACGCTGGTGAAAGTAAAAGATGCTGAA
GATCAGTTGGGTGCACGAGTGGGTTACATCGAACTGGATCTCAACAGCGGTAAGATCCTTGA
GAGTTTTCGCCCCGAAGAACGTTTTCCAATGATGAGCACTTTTAAAGTTCTGCTATGTGGCGC
GGTATTATCCCGTATTGACGCCGGGCAAGAGCAACTCGGTCGCCGCATACACTATTCTCAGA
ATGACTTGGTTGAGTACTCACCAGTCACAGAAAAGCATCTTACGGATGGCATGACAGTAAGAG
AATTATGCAGTGCTGCCATAACCATGAGTGATAACACTGCGGCCAACTTACTTCTGACAACGA
TCGGAGGACCGAAGGAGCTAACCGCTTTTTTGCACAACATGGGGGATCATGTAACTCGCCTT
GATCGTTGGGAACCGGAGCTGAATGAAGCCATACCAAACGACGAGCGTGACACCACGATGC
CTGTAGCAATGGCAACAACGTTGCGCAAACTATTAACTGGCGAACTACTTACTCTAGCTTCCC
GGCAACAATTAATAGACTGGATGGAGGCGGATAAAGTTGCAGGACCACTTCTGCGCTCGGCC
CTTCCGGCTGGCTGGTTTATTGCTGATAAATCTGGAGCCGGTGAGCGTGGGTCTCGCGGTAT
CATTGCAGCACTGGGGCCAGATGGTAAGCCCTCCCGTATCGTAGTTATCTACACGACGGGGA
GTCAGGCAACTATGGATGAACGAAATAGACAGATCGCTGAGATAGGTGCCTCACTGATTAAG
CATTGGTAACTGTCAGACCAAGTTTACTCATATATACTTTAGATTGATTTAAAACTTCATTTTTA
ATTTAAAAGGATCTAGGTGAAGATCCTTTTTGATAATCTCATGACCAAAATCCCTTAACGTGAG
TTTTCGTTCCACTGAGCGTCAGACCCCGTAGAAAAGATCAAAGGATCTTCTTGAGATCCTTTTT
TTCTGCGCGTAATCTGCTGCTTGCAAACAAAAAAACCACCGCTACCAGCGGTGGTTTGTTTGC
CGGATCAAGAGCTACCAACTCTTTTTCCGAAGGTAACTGGCTTCAGCAGAGCGCAGATACCA
AATACTGTCCTTCTAGTGTAGCCGTAGTTAGGCCACCACTTCAAGAACTCTGTAGCACCGCCT
ACATACCTCGCTCTGCTAATCCTGTTACCAGTGGCTGCTGCCAGTGGCGATAAGTCGTGTCTT
ACCGGGTTGGACTCAAGACGATAGTTACCGGATAAGGCGCAGCGGTCGGGCTGAACGGGGG
GTTCGTGCACACAGCCCAGCTTGGAGCGAACGACCTACACCGAACTGAGATACCTACAGCGT
GAGCATTGAGAAAGCGCCACGCTTCCCGAAGGGAGAAAGGCGGACAGGTATCCGGTAAGCG
GCAGGGTCGGAACAGGAGAGCGCACGAGGGAGCTTCCAGGGGGAAACGCCTGGTATCTTTA
TAGTCCTGTCGGGTTTCGCCACCTCTGACTTGAGCGTCGATTTTTGTGATGCTCGTCAGGGG
GGCGGAGCCTATGGAAAAACGCCAGCAACGCGGCCTTTTTACGGTTCCTGGCCTTTTGCTGG
CCTTTTGCTCACATGTTCTTTCCTGCGTTATCCCCTGATTCTGTGGATAACCGTATTACCGCCT
TTGAGTGAGCTGATACCGCTCGCCGCAGCCGAACGACCGAGCGCAGCGAGTCAGTGAGCGA
GGAAGCGGAAGAGCGCCCAATACGCAAACCGCCTCTCCCCGCGCGTTGGCCGATTCATTAAT
GCAGCTGGCACGACAGGTTTCCCGACTGGAAAGCGGGCAGTGAGCGCAACGCAATTAATGT
GAGTTAGCTCACTCATTAGGCACCCCAGGCTTTACACTTTATGCTTCCGGCTCGTATGTTGTG
TGGAATTGTGAGCGGATAACAATTTCACACAGGAAACAGCTATGACCATGATTACGCCAAGCT
TTGCTCTTAGGAGTTTCCTAATACATCCCAAACTCAAATATATAAAGCATTTGACTTGTTCTATG
CCCTAGGGGGCGGGGGGAAGCTAAGCCAGCTTTTTTTAACATTTAAAATGTTAATTCCATTTT
AAATGCACAGATGTTTTTATTTCATAAGGGTTTCAATGTGCATGAATGCTGCAATATTCCTGTT
ACCAAAGCTAGTATAAATAAAAATAGATAAACGTGGAAATTACTTAGAGTTTCTGTCATTAACG
TTTCCTTCCTCAGTTGACAACATAAATGCGCTGCTGAGCAAGCCAGTTTGCATCTGTCAGGAT
CAATTTCCCATTATGCCAGTCATATTAATTACTAGTCAATTAGTTGATTTTTATTTTTGACATATA
CATGTGAA
SEQ ID NO: 18, (nucleotide sequence of F_{v′}Fᵥₗₛ with XhoI/SalI linkers,
(wobbled codons lowercase in F_{v′}))
ctcgagGGcGTcCAaGTcGAaACcATtagtCCcGGcGAtGGcaGaACaTTtCCtAAaaGgGGaCAaACaTG
tGTcGTcCAtTAtACaGGcATGtTgGAgGAcGGcAAaAAgGTgGAcagtagtaGaGAtcGcAAtAAaCCtTTc
AAaTTcATGtTgGGaAAaCAaGAaGTcATtaGgGGaTGGGAgGAgGGcGTgGCtCAaATGtccGTcGGc
CAacGcGCtAAgCTcACcATcagcCCcGAcTAcGCaTAcGGcGCtACcGGaCAtCCcGGaATtATtCCcC
CtCAcGCtACctTgGTgTTtGAcGTcGAaCTgtTgAAgCTcGAagtcgagggagtgcaggtggaaaccatctccccag
gagacgggcgcaccttccccaagcgcggccagacctgcgtggtgcactacaccgggatgcttgaagatggaaagaaagttgattcctc
ccgggacagaaacaagccctttaagtttatgctaggcaagcaggaggtgatccgaggctgggaagaaggggttgcccagatgagtgtg
ggtcagagagccaaactgactatatctccagattatgcctatggtgccactgggcacccaggcatcatcccaccacatgccactctcgtctt
cgatgtggagcttctaaaactggaatctggcggtggatccggagtcgag
SEQ ID NO: 19, (F_{v′}F_{VLS} amino acid sequence)
GlyValGlnValGluThrIleSerProGlyAspGlyArgThrPheProLysArgGlyGlnThrCysValValHisTyrThrGlyMet
LeuGluAspGlyLysLysValAspSerSerArgAspArgAsnLysProPheLysPheMetLeuGlyLysGlnGluValIle
ArgGlyTrpGluGluGlyValAlaGlnMetSerValGlyGlnArgAlaLysLeuThrIleSerProAspTyrAlaTyrGlyAlaThr
GlyHisProGlyIleIleProProHisAlaThrLeuValPheAspValGluLeuLeuLysLeuGlu (ValGlu)
GlyValGlnValGluThrIleSerProGlyAspGlyArgThrPheProLysArgGlyGlnThrCysValValHisTyrThrGlyMet
LeuGluAspGlyLysLysValAspSerSerArgAspArgAsnLysProPheLysPheMetLeuGlyLysGlnGluValIle
ArgGlyTrpGluGluGlyValAlaGlnMetSerValGlyGlnArgAlaLysLeuThrIleSerProAspTyrAlaTyrGlyAlaThr
GlyHisProGlyIleIleProProHisAlaThrLeuValPheAspValGluLeuLeuLysLeuGlu-SerGlyGlyGlySerGly
SEQ ID NO: 20, FKBP12v36 (res. 2-108)
SGGGSG Linker (6 aa) (SEQ ID NO: 289)
ΔCasp9 (res. 135-416)
ATGCTCGAGGGAGTGCAGGTGGAgACtATCTCCCCAGGAGACGGGCGCACCTTCCCCAAGCG
CGGCCAGACCTGCGTGGTGCACTACACCGGGATGCTTGAAGATGGAAAGAAAGTTGATTCCT
CCCGGGACAGAAACAAGCCCTTTAAGTTTATGCTAGGCAAGCAGGAGGTGATCCGAGGCTGG
GAAGAAGGGGTTGCCCAGATGAGTGTGGGTCAGAGAGCCAAACTGACTATATCTCCAGATTA
TGCCTATGGTGCCACTGGGCACCCAGGCATCATCCCACCACATGCCACTCTCGTCTTCGATG
TGGAGCTTCTAAAACTGGAATCTGGCGGTGGATCCGGAGTCGACGGATTTGGTGATGTCGGT
GCTCTTGAGAGTTTGAGGGGAAATGCAGATTTGGCTTACATCCTGAGCATGGAGCCCTGTGG
CCACTGCCTCATTATCAACAATGTGAACTTCTGCCGTGAGTCCGGGCTCCGCACCCGCACTG
GCTCCAACATCGACTGTGAGAAGTTGCGGCGTCGCTTCTCCTCGCTGCATTTCATGGTGGAG
GTGAAGGGCGACCTGACTGCCAAGAAAATGGTGCTGGCTTTGCTGGAGCTGGCGCgGCAGG
ACCACGGTGCTCTGGACTGCTGCGTGGTGGTCATTCTCTCTCACGGCTGTCAGGCCAGCCAC
CTGCAGTTCCCAGGGGCTGTCTACGGCACAGATGGATGCCCTGTGTCGGTCGAGAAGATTGT
GAACATCTTCAATGGGACCAGCTGCCCCAGCCTGGGAGGGAAGCCCAAGCTCTTTTTCATCC
AGGCCTGTGGTGGGGAGCAGAAAGACCATGGGTTTGAGGTGGCCTCCACTTCCCCTGAAGA
CGAGTCCCCTGGCAGTAACCCCGAGCCAGATGCCACCCCGTTCCAGGAAGGTTTGAGGACC
TTCGACCAGCTGGACGCCATATCTAGTTTGCCCACACCCAGTGACATCTTTGTGTCCTACTCT
ACTTTCCCAGGTTTTGTTTCCTGGAGGGACCCCAAGAGTGGCTCCTGGTACGTTGAGACCCT
GGACGACATCTTTGAGCAGTGGGCTCACTCTGAAGACCTGCAGTCCCTCCTGCTTAGGGTCG
CTAATGCTGTTTCGGTGAAAGGGATTTATAAACAGATGCCTGGTTGCTTTAATTTCCTCCGGAA
AAAACTTTTCTTTAAAACATCA
SEQ ID NO: 21, FKBP12v36 (res. 2-108)
G V Q V E T I S P G D G R T F P K R G Q T C V V H Y T G M L E D G K K
V D S S R D R N K P F K F M L G K Q E V I R G W E E G V A Q M S V G Q
R A K L T I S P D Y A Y G A T G H P G I I P P H A T L V F D V E L L K L E
SEQ ID NO: 22, ΔCasp9 (res. 135-416)
G F G D V G A L E S L R G N A D L A Y I L S M E P C G H C L I I N N V N
F C R E S G L R T R T G S N I D C E K L R R R F S S L H F M V E V K G D
L T A K K M V L A L L E L A R Q D H G A L D C C V V V I L S H G C Q A S
H L Q F P G A V Y G T D G C P V S V E K I V N I F N G T S C P S L G G K
P K L F F I Q A C G G E Q K D H G F E V A S T S P E D E S P G S N P E P
D A T P F Q E G L R T F D Q L D A I S S L P T P S D I F V S Y S T F P G
F V S W R D P K S G S W Y V E T L D D I F E Q W A H S E D L Q S L L L
R V A N A V S V K G I Y K Q M P G C F N F L R K K L F F K T S
SEQ ID NO: 23, ΔCasp9 (res. 135-416) D330A, nucleotide sequence
GGATTTGGTGATGTCGGTGCTCTTGAGAGTTTGAGGGGAAATGCAGATTTGGCTTACATCCTG
AGCATGGAGCCCTGTGGCCACTGCCTCATTATCAACAATGTGAACTTCTGCCGTGAGTCCGG
GCTCCGCACCCGCACTGGCTCCAACATCGACTGTGAGAAGTTGCGGCGTCGCTTCTCCTCGC
TGCATTTCATGGTGGAGGTGAAGGGCGACCTGACTGCCAAGAAAATGGTGCTGGCTTTGCTG
GAGCTGGCGCgGCAGGACCACGGTGCTCTGGACTGCTGCGTGGTGGTCATTCTCTCTCACG
GCTGTCAGGCCAGCCACCTGCAGTTCCCAGGGGCTGTCTACGGCACAGATGGATGCCCTGT
GTCGGTCGAGAAGATTGTGAACATCTTCAATGGGACCAGCTGCCCCAGCCTGGGAGGGAAG
CCCAAGCTCTTTTTCATCCAGGCCTGTGGTGGGGAGCAGAAAGACCATGGGTTTGAGGTGGC
CTCCACTTCCCCTGAAGACGAGTCCCCTGGCAGTAACCCCGAGCCAGATGCCACCCCGTTCC
AGGAAGGTTTGAGGACCTTCGACCAGCTGGCCGCCATATCTAGTTTGCCCACACCCAGTGAC
ATCTTTGTGTCCTACTCTACTTTCCCAGGTTTTGTTTCCTGGAGGGACCCCAAGAGTGGCTCC
TGGTACGTTGAGACCCTGGACGACATCTTTGAGCAGTGGGCTCACTCTGAAGACCTGCAGTC
CCTCCTGCTTAGGGTCGCTAATGCTGTTTCGGTGAAAGGGATTTATAAACAGATGCCTGGTTG
CTTTAATTTCCTCCGGAAAAAACTTTTCTTTAAAACATCA
SEQ ID NO: 24, ΔCasp9 (res. 135-416) D330A, amino acid sequence
G F G D V G A L E S L R G N A D L A Y I L S M E P C G H C L I I N N V N
F C R E S G L R T R T G S N I D C E K L R R R F S S L H F M V E V K G D
L T A K K M V L A L L E L A R Q D H G A L D C C V V V I L S H G C Q A S
H L Q F P G A V Y G T D G C P V S V E K I V N I F N G T S C P S L G G K
P K L F F I Q A C G G E Q K D H G F E V A S T S P E D E S P G S N P E P
D A T P F Q E G L R T F D Q L A A I S S L P T P S D I F V S Y S T F P G F
V S W R D P K S G S W Y V E T L D D I F E Q W A H S E D L Q S L L L R
V A N A V S V K G I Y K Q M P G C F N F L R K K L F F K T S
SEQ ID NO: 25, ΔCasp9 (res. 135-416) N405Q nucleotide sequence
GGATTTGGTGATGTCGGTGCTCTTGAGAGTTTGAGGGGAAATGCAGATTTGGCTTACATCCTG
AGCATGGAGCCCTGTGGCCACTGCCTCATTATCAACAATGTGAACTTCTGCCGTGAGTCCGG
GCTCCGCACCCGCACTGGCTCCAACATCGACTGTGAGAAGTTGCGGCGTCGCTTCTCCTCGC
TGCATTTCATGGTGGAGGTGAAGGGCGACCTGACTGCCAAGAAAATGGTGCTGGCTTTGCTG
GAGCTGGCGCgGCAGGACCACGGTGCTCTGGACTGCTGCGTGGTGGTCATTCTCTCTCACG
GCTGTCAGGCCAGCCACCTGCAGTTCCCAGGGGCTGTCTACGGCACAGATGGATGCCCTGT
GTCGGTCGAGAAGATTGTGAACATCTTCAATGGGACCAGCTGCCCCAGCCTGGGAGGGAAG
CCCAAGCTCTTTTTCATCCAGGCCTGTGGTGGGGAGCAGAAAGACCATGGGTTTGAGGTGGC
CTCCACTTCCCCTGAAGACGAGTCCCCTGGCAGTAACCCCGAGCCAGATGCCACCCCGTTCC
AGGAAGGTTTGAGGACCTTCGACCAGCTGGACGCCATATCTAGTTTGCCCACACCCAGTGAC
ATCTTTGTGTCCTACTCTACTTTCCCAGGTTTTGTTTCCTGGAGGGACCCCAAGAGTGGCTCC
TGGTACGTTGAGACCCTGGACGACATCTTTGAGCAGTGGGCTCACTCTGAAGACCTGCAGTC
CCTCCTGCTTAGGGTCGCTAATGCTGTTTCGGTGAAAGGGATTTATAAACAGATGCCTGGTTG
CTTTCAGTTCCTCCGGAAAAAACTTTTCTTTAAAACATCA
SEQ ID NO: 26, ΔCasp9 (res. 135-416) N405Q amino acid sequence
G F G D V G A L E S L R G N A D L A Y I L S M E P C G H C L I I N N V N
F C R E S G L R T R T G S N I D C E K L R R R F S S L H F M V E V K G D
L T A K K M V L A L L E L A R Q D H G A L D C C V V V I L S H G C Q A S
H L Q F P G A V Y G T D G C P V S V E K I V N I F N G T S C P S L G G K
P K L F F I Q A C G G E Q K D H G F E V A S T S P E D E S P G S N P E P
D A T P F Q E G L R T F D Q L D A I S S L P T P S D I F V S Y S T F P G
F V S W R D P K S G S W Y V E T L D D I F E Q W A H S E D L Q S L L L
R V A N A V S V K G I Y K Q M P G C F Q F L R K K L F F K T S
SEQ ID NO: 27, ΔCasp9 (res. 135-416) D330A N405Q nucleotide sequence
GGATTTGGTGATGTCGGTGCTCTTGAGAGTTTGAGGGGAAATGCAGATTTGGCTTACATCCTG
AGCATGGAGCCCTGTGGCCACTGCCTCATTATCAACAATGTGAACTTCTGCCGTGAGTCCGG
GCTCCGCACCCGCACTGGCTCCAACATCGACTGTGAGAAGTTGCGGCGTCGCTTCTCCTCGC
TGCATTTCATGGTGGAGGTGAAGGGCGACCTGACTGCCAAGAAAATGGTGCTGGCTTTGCTG
GAGCTGGCGCgGCAGGACCACGGTGCTCTGGACTGCTGCGTGGTGGTCATTCTCTCTCACG
GCTGTCAGGCCAGCCACCTGCAGTTCCCAGGGGCTGTCTACGGCACAGATGGATGCCCTGT
GTCGGTCGAGAAGATTGTGAACATCTTCAATGGGACCAGCTGCCCCAGCCTGGGAGGGAAG
CCCAAGCTCTTTTTCATCCAGGCCTGTGGTGGGGAGCAGAAAGACCATGGGTTTGAGGTGGC
CTCCACTTCCCCTGAAGACGAGTCCCCTGGCAGTAACCCCGAGCCAGATGCCACCCCGTTCC
AGGAAGGTTTGAGGACCTTCGACCAGCTGGCCGCCATATCTAGTTTGCCCACACCCAGTGAC
ATCTTTGTGTCCTACTCTACTTTCCCAGGTTTTGTTTCCTGGAGGGACCCCAAGAGTGGCTCC
TGGTACGTTGAGACCCTGGACGACATCTTTGAGCAGTGGGCTCACTCTGAAGACCTGCAGTC
CCTCCTGCTTAGGGTCGCTAATGCTGTTTCGGTGAAAGGGATTTATAAACAGATGCCTGGTTG
CTTTCAGTTCCTCCGGAAAAAACTTTTCTTTAAAACATCA
SEQ ID NO: 28, ΔCasp9 (res. 135-416) D330A N405Q amino acid sequence
G F G D V G A L E S L R G N A D L A Y I L S M E P C G H C L I I N N V N
F C R E S G L R T R T G S N I D C E K L R R R F S S L H F M V E V K G D
L T A K K M V L A L L E L A R Q D H G A L D C C V V V I L S H G C Q A S
H L Q F P G A V Y G T D G C P V S V E K I V N I F N G T S C P S L G G K
P K L F F I Q A C G G E Q K D H G F E V A S T S P E D E S P G S N P E P
D A T P F Q E G L R T F D Q L A A I S S L P T P S D I F V S Y S T F P G F
V S W R D P K S G S W Y V E T L D D I F E Q W A H S E D L Q S L L L R
V A N A V S V K G I Y K Q M P G C F Q F L R K K L F F K T S
SEQ ID NO: 29, FKBPv36 (Fv1) nucleotide sequence
GGCGTTCAAGTAGAAACAATCAGCCCAGGAGACGGAAGGACTTTCCCCAAACGAGGCCAAAC
ATGCGTAGTTCATTATACTGGGATGCTCGAAGATGGAAAAAAAGTAGATAGTAGTAGAGACCG
AAACAAACCATTTAAATTTATGTTGGGAAAACAAGAAGTAATAAGGGGCTGGGAAGAAGGTGT
AGCACAAATGTCTGTTGGCCAGCGCGCAAAACTCACAATTTCTCCTGATTATGCTTACGGAGC
TACCGGCCACCCCGGCATCATACCCCCTCATGCCACACTGGTGTTTGACGTCGAATTGCTCA
AACTGGAA
SEQ ID NO: 30, FKBPv36 (Fv1) amino acid sequence
GVQVETISPGDGRTFPKRGQTCVVHYTGMLEDGKKVDSSRDRNKPFKFMLGKQEVIRGWEEGV
AQMSVGQRAKLTISPDYAYGATGHPGIIPPHATLVFDVELLKLE
SEQ ID NO: 31, FKBPv36 (Fv2) nucleotide sequence
GGaGTgCAgGTgGAgACgATtAGtCCtGGgGAtGGgAGaACcTTtCCaAAgCGcGGtCAgACcTGtGTt
GTcCAcTAcACcGGtATGCTgGAgGAcGGgAAgAAgGTgGActcTtcacGcGAtCGcAAtAAgCCtTTcAA
gTTcATGcTcGGcAAgCAgGAgGTgATccGGGGgTGGGAgGAgGGcGTgGCtCAgATGTCgGTcGGg
CAaCGaGCgAAgCTtACcATcTCaCCcGAcTAcGCgTAtGGgGCaACgGGgCAtCCgGGaATtATcCCt
CCcCAcGCtACgCTcGTaTTcGAtGTgGAgcTcttgAAgCTtGag
SEQ ID NO: 32, FKBPv36 (Fv2) amino acid sequence
GVQVETISPGDGRTFPKRGQTCVVHYTGMLEDGKKVDSSRDRNKPFKFMLGKQEVIRGWEEGV
AQMSVGQRAKLTISPDYAYGATGHPGIIPPHATLVFDVELLKLE
SEQ ID NO: 33, ΔCD19 nucleotide sequence
ATGCCCCCTCCTAGACTGCTGTTTTTCCTGCTCTTTCTCACCCCAATGGAAGTTAGACCTGAG
GAACCACTGGTCGTTAAAGTGGAAGAAGGTGATAATGCTGTCCTCCAATGCCTTAAAGGGAC
CAGCGACGGACCAACGCAGCAACTGACTTGGAGCCGGGAGTCCCCTCTCAAGCCGTTTCTC
AAGCTGTCACTTGGCCTGCCAGGTCTTGGTATTCACATGCGCCCCCTTGCCATTTGGCTCTTC
ATATTCAATGTGTCTCAACAAATGGGTGGATTCTACCTTTGCCAGCCCGGCCCCCCTTCTGAG
AAAGCTTGGCAGCCTGGATGGACCGTCAATGTTGAAGGCTCCGGTGAGCTGTTTAGATGGAA
TGTGAGCGACCTTGGCGGACTCGGTTGCGGACTGAAAAATAGGAGCTCTGAAGGACCCTCTT
CTCCCTCCGGTAAGTTGATGTCACCTAAGCTGTACGTGTGGGCCAAGGACCGCCCCGAAATC
TGGGAGGGCGAGCCTCCATGCCTGCCGCCTCGCGATTCACTGAACCAGTCTCTGTCCCAGG
ATCTCACTATGGCGCCCGGATCTACTCTTTGGCTGTCTTGCGGCGTTCCCCCAGATAGCGTG
TCAAGAGGACCTCTGAGCTGGACCCACGTACACCCTAAGGGCCCTAAGAGCTTGTTGAGCCT
GGAACTGAAGGACGACAGACCCGCACGCGATATGTGGGTAATGGAGACCGGCCTTCTGCTC
CCTCGCGCTACCGCACAGGATGCAGGGAAATACTACTGTCATAGAGGGAATCTGACTATGAG
CTTTCATCTCGAAATTACAGCACGGCCCGTTCTTTGGCATTGGCTCCTCCGGACTGGAGGCT
GGAAGGTGTCTGCCGTAACACTCGCTTACTTGATTTTTTGCCTGTGTAGCCTGGTTGGGATCC
TGCATCTTCAGCGAGCCCTTGTATTGCGCCGAAAAAGAAAACGAATGACTGACCCTACACGA
CGATTCTGA
SEQ ID NO: 34, ΔCD19 amino acid sequence
MPPPRLLFFLLFLTPMEVRPEEPLVVKVEEGDNAVLQCLKGTSDGPTQQLTWSRESPLKPFLKLS
LGLPGLGIHMRPLAIWLFIFNVSQQMGGFYLCQPGPPSEKAWQPGWTVNVEGSGELFRWNVSDL
GGLGCGLKNRSSEGPSSPSGKLMSPKLYVWAKDRPEIWEGEPPCLPPRDSLNQSLSQDLTMAP
GSTLWLSCGVPPDSVSRGPLSWTHVHPKGPKSLLSLELKDDRPARDMWVMETGLLLPRATAQD
AGKYYCHRGNLTMSFHLEITARPVLWHWLLRTGGWKVSAVTLAYLIFCLCSLVGILHLQRALVLRR
KRKRMTDPTRRF*
Codon optimized iCasp9-N405Q-2A-ΔCD19 sequence: (the .co following the name of a nucleotide
sequence indicates that it is codon optimized (or the amino acid sequence coded by the codon-
optimized nucleotide sequence).
SEQ-ID NO: 35, FKBPv36.co (Fv3) nucleotide sequence
ATGCTGGAGGGAGTGCAGGTGGAGACTATTAGCCCCGGAGATGGCAGAACATTCCCCAAAA
GAGGACAGACTTGCGTCGTGCATTATACTGGAATGCTGGAAGACGGCAAGAAGGTGGACAG
CAGCCGGGACCGAAACAAGCCCTTCAAGTTCATGCTGGGGAAGCAGGAAGTGATCCGGGGC
TGGGAGGAAGGAGTCGCACAGATGTCAGTGGGACAGAGGGCCAAACTGACTATTAGCCCAG
ACTACGCTTATGGAGCAACCGGCCACCCCGGGATCATTCCCCCTCATGCTACACTGGTCTTC
GATGTGGAGCTGCTGAAGCTGGAA
SEQ ID NO: 36, FKBPv36.co (Fv3) amino acid sequence
MLEGVQVETISPGDGRTFPKRGQTCVVHYTGMLEDGKKVDSSRDRNKPFKFMLGKQEVIRGWE
EGVAQMSVGQRAKLTISPDYAYGATGHPGIIPPHATLVFDVELLKLE
SEQ ID NO: 37, Linker.co nucleotide sequence
AGCGGAGGAGGATCCGGA
SEQ ID NO: 38, Linker.co amino acid sequence
SGGGSG
SEQ IDNO: 39, Caspase-9.co nucleotide sequence
GTGGACGGGTTTGGAGATGTGGGAGCCCTGGAATCCCTGCGGGGCAATGCCGATCTGGCTT
ACATCCTGTCTATGGAGCCTTGCGGCCACTGTCTGATCATTAACAATGTGAACTTCTGCAGAG
AGAGCGGGCTGCGGACCAGAACAGGATCCAATATTGACTGTGAAAAGCTGCGGAGAAGGTT
CTCTAGTCTGCACTTTATGGTCGAGGTGAAAGGCGATCTGACCGCTAAGAAAATGGTGCTGG
CCCTGCTGGAACTGGCTCGGCAGGACCATGGGGCACTGGATTGCTGCGTGGTCGTGATCCT
GAGTCACGGCTGCCAGGCTTCACATCTGCAGTTCCCTGGGGCAGTCTATGGAACTGACGGCT
GTCCAGTCAGCGTGGAGAAGATCGTGAACATCTTCAACGGCACCTCTTGCCCAAGTCTGGGC
GGGAAGCCCAAACTGTTCTTTATTCAGGCCTGTGGAGGCGAGCAGAAAGATCACGGCTTCGA
AGTGGCTAGCACCTCCCCCGAGGACGAATCACCTGGAAGCAACCCTGAGCCAGATGCAACC
CCCTTCCAGGAAGGCCTGAGGACATTTGACCAGCTGGATGCCATCTCAAGCCTGCCCACACC
TTCTGACATTTTCGTCTCTTACAGTACTTTCCCTGGATTTGTGAGCTGGCGCGATCCAAAGTCA
GGCAGCTGGTACGTGGAGACACTGGACGATATCTTTGAGCAGTGGGCCCATTCTGAAGACCT
GCAGAGTCTGCTGCTGCGAGTGGCCAATGCTGTCTCTGTGAAGGGGATCTACAAACAGATGC
CAGGATGCTTCCAGTTTCTGAGAAAGAAACTGTTCTTTAAGACCTCCGCATCTAGGGCC
SEQ ID NO: 40, Caspase-9.co amino acid sequence
VDGFGDVGALESLRGNADLAYILSMEPCGHCLIINNVNFCRESGLRTRTGSNIDCEKLRRRFSSLH
FMVEVKGDLTAKKMVLALLELARQDHGALDCCVVVILSHGCQASHLQFPGAVYGTDGCPVSVEKI
VNIFNGTSCPSLGGKPKLFFIQACGGEQKDHGFEVASTSPEDESPGSNPEPDATPFQEGLRTFDQ
LDAISSLPTPSDIFVSYSTFPGFVSWRDPKSGSWYVETLDDIFEQWAHSEDLQSLLLRVANAVSVK
GIYKQMPGCFQFLRKKLFFKTSASRA
SEQ ID NO: 41, Linker.co nucleotide sequence
CCGCGG
SEQ ID NO: 42, Linker.co amino acid sequence
PR
SEQ ID NO: 308: T2A.co nucleotide sequence
GAAGGCCGAGGGAGCCTGCTGACATGTGGCGATGTGGAGGAAAACCCAGGACCA
SEQ ID NO: 43: T2A.co amino acid sequence
EGRGSLLTCGDVEENPGP
SEQ ID NO: 309: Δ CD19.co nucleotide sequence
ATGCCACCACCTCGCCTGCTGTTCTTTCTGCTGTTCCTGACACCTATGGAGGTGCGACCTGA
GGAACCACTGGTCGTGAAGGTCGAGGAAGGCGACAATGCCGTGCTGCAGTGCCTGAAAGGC
ACTTCTGATGGGCCAACTCAGCAGCTGACCTGGTCCAGGGAGTCTCCCCTGAAGCCTTTTCT
GAAACTGAGCCTGGGACTGCCAGGACTGGGAATCCACATGCGCCCTCTGGCTATCTGGCTGT
TCATCTTCAACGTGAGCCAGCAGATGGGAGGATTCTACCTGTGCCAGCCAGGACCACCATCC
GAGAAGGCCTGGCAGCCTGGATGGACCGTCAACGTGGAGGGGTCTGGAGAACTGTTTAGGT
GGAATGTGAGTGACCTGGGAGGACTGGGATGTGGGCTGAAGAACCGCTCCTCTGAAGGCCC
AAGTTCACCCTCAGGGAAGCTGATGAGCCCAAAACTGTACGTGTGGGCCAAAGATCGGCCCG
AGATCTGGGAGGGAGAACCTCCATGCCTGCCACCTAGAGACAGCCTGAATCAGAGTCTGTCA
CAGGATCTGACAATGGCCCCCGGGTCCACTCTGTGGCTGTCTTGTGGAGTCCCACCCGACA
GCGTGTCCAGAGGCCCTCTGTCCTGGACCCACGTGCATCCTAAGGGGCCAAAAAGTCTGCT
GTCACTGGAACTGAAGGACGATCGGCCTGCCAGAGACATGTGGGTCATGGAGACTGGACTG
CTGCTGCCACGAGCAACCGCACAGGATGCTGGAAAATACTATTGCCACCGGGGCAATCTGAC
AATGTCCTTCCATCTGGAGATCACTGCAAGGCCCGTGCTGTGGCACTGGCTGCTGCGAACCG
GAGGATGGAAGGTCAGTGCTGTGACACTGGCATATCTGATCTTTTGCCTGTGCTCCCTGGTG
GGCATTCTGCATCTGCAGAGAGCCCTGGTGCTGCGGAGAAAGAGAAAGAGAATGACTGACC
CAACAAGAAGGTTTTGA
SEQ ID NO: 310: Δ CD19.co amino acid sequence
MPPPRLLFFLLFLTPMEVRPEEPLVVKVEEGDNAVLQCLKGTSDGPTQQLTWSRESPLKPFLKLS
LGLPGLGIHMRPLAIWLFIFNVSQQMGGFYLCQPGPPSEKAWQPGWTVNVEGSGELFRWNVSDL
GGLGCGLKNRSSEGPSSPSGKLMSPKLYVWAKDRPEIWEGEPPCLPPRDSLNQSLSQDLTMAP
GSTLWLSCGVPPDSVSRGPLSWTHVHPKGPKSLLSLELKDDRPARDMWVMETGLLLPRATAQD
AGKYYCHRGNLTMSFHLEITARPVLWHWLLRTGGWKVSAVTLAYLIFCLCSLVGILHLQRALVLRR
KRKRMTDPTRRF*

TABLE 6
Additional Examples of Caspase-9 Variants

| iCasp9 Variants | DNA sequence | Amino acid sequence |
|---|---|---|
| Fv-L-Caspase9 WT-2A | Fv disclosed as SEQ ID NO: 311, Linker | Fv disclosed as SEQ ID NO: 314, |
| | disclosed as SEQ ID NO: 312, iCasp9 | Linker disclosed as SEQ ID NO: |
| | disclose as SEQ ID NO: 44 and T2A | 315, iCasp9 disclose as SEQ ID NO: |
| | disclosed as SEQ ID NO: 313 | 45 and T2A disclosed as SEQ ID |
| | (Fv)ATGCTCGAGGGAGTGCAGGTGGAgACtA | NO: 316 |
| | TCTCCCCAGGAGACGGGCGCACCTTCCCCAA | (Fv)MLEGVQVETISPGDGRTFPKRGQ |
| | GCGCGGCCAGACCTGCGTGGTGCACTACAC | TCVVHYTGMLEDGKKVDSSRDRNKP |
| | CGGGATGCTTGAAGATGGAAAGAAAGTTGA | FKFMLGKQEVIR |
| | TTCCTCCCGGGACAGAAACAAGCCCTTTAAG | GWEEGVAQMSVGQRAKLTISPDYAY |
| | TTTATGCTAGGCAAGCAGGAGGTGATCCGA | GATGHPGIIPPHATLVFDVELLKLE- |
| | GGCTGGGAAGAAGGGGTTGCCCAGATGAG | (linker)SGGGSG-(iCasp9)VDGF |
| | TGTGGGTCAGAGAGCCAAACTGACTATATCT | GDVGALESLRGNADLAYILSMEPCGH |
| | CCAGATTATGCCTATGGTGCCACTGGGCACC | CLIINNVNFCRESGLRTRTGSNIDCEKL |
| | CAGGCATCATCCCACCACATGCCACTCTCGT | RRRFSS |
| | CTTCGATGTGGAGCTTCTAAAACTGGA- | LHFMVEVKGDLTAKKMVLALLELAR |
| | (linker)TCTGGCGGTGGATCCGGA- | QDHGALDCCVVVILSHGCQASHLQF |
| | (iCasp9)GTCGACGGATTTGGTGATGTCGGT | PGAVYGTDGC |
| | GCTCTTGAGAGTTTGAGGGGAAATGCAGAT | PVSVEKIVNIFNGTSCPSLGGKPKLFFI |
| | TTGGCTTACATCCTGAGCATGGAGCCCTGTG | QACGGEQKDHGFEVASTSPEDESPG |
| | GCCACTGCCTCATTATCAACAATGTGAACTT | SNPEPDA |
| | CTGCCGTGAGTCCGGGCTCCGCACCCGCACT | TPFQEGLRTFDQLDAISSLPTPSDIFVS |
| | GGCTCCAACATCGACTGTGAGAAGTTGCGG | YSTFPGFVSWRDPKSGSWYVETLDDI |
| | CGTCGCTTCTCCTCGCTGCATTTCATGGTGG | FEQWAH |
| | AGGTGAAGGGCGACCTGACTGCCAAGAAAA | SEDLQSLLLRVANAVSVKGIYKQMPG |
| | TGGTGCTGGCTTTGCTGGAGCTGGCGCGGC | CFNFLRKKLFFKTSASRA- |
| | AGGACCACGGTGCTCTGGACTGCTGCGTGG | EGRGSLLTCGDVEENP |
| | TGGTCATTCTCTCTCACGGCTGTCAGGCCAG | GP- |
| | CCACCTGCAGTTCCCAGGGGCTGTCTACGGC | |
| | ACAGATGGATGCCCTGTGTCGGTCGAGAAG | |
| | ATTGTGAACATCTTCAATGGGACCAGCTGCC | |
| | CCAGCCTGGGAGGGAAGCCCAAGCTCTTTTT | |
| | CATCCAGGCCTGTGGTGGGGAGCAGAAAGA | |
| | CCATGGGTTTGAGGTGGCCTCCACTTCCCCT | |
| | GAAGACGAGTCCCCTGGCAGTAACCCCGAG | |
| | CCAGATGCCACCCCGTTCCAGGAAGGTTTGA | |
| | GGACCTTCGACCAGCTGGACGCCATATCTAG | |
| | TTTGCCCACACCCAGTGACATCTTTGTGTCCT | |
| | ACTCTACTTTCCCAGGTTTTGTTTCCTGGAGG | |
| | GACCCCAAGAGTGGCTCCTGGTACGTTGAG | |
| | ACCCTGGACGACATCTTTGAGCAGTGGGCTC | |
| | ACTCTGAAGACCTGCAGTCCCTCCTGCTTAG | |
| | GGTCGCTAATGCTGTTTCGGTGAAAGGGATT | |
| | TATAAACAGATGCCTGGTTGCTTTAATTTCCT | |
| | CCGGAAAAAACTTTTCTTTAAAACATCAGCT | |
| | AGCAGAGCC- | |
| | (T2A)GAGGGCAGGGGAAGTCTTCTAACATG | |
| | CGGGGACGTGGAGGAAAATCCCGGGCCC | |
| Fv-L-iCaspase9 WT | Fv disclosed as SEQ ID NO: 317, Linker | iCaspase9 disclosed as SEQ ID NO: |
| codon optimized-T2A | disclosed as SEQ ID NO: 318, iCasp9 | 47 and T2A disclosed as SEQ ID |
| codon optimized | disclose as SEQ ID NO: 46 and T2A | NO: 320 |
| | disclosed as SEQ ID NO: 319 | (Fv-L)- |
| | (Fv)- | VDGFGDVGALESLRGNADLAYILSME |
| | GGAGTGCAGGTGGAGACTATTAGCCCCGGA | PCGHCLIINNVNFCRESGLRTRTGSNI |
| | GATGGCAGAACATTCCCCAAAAGAGGACAG | DCEKLRRRFSS |
| | ACTTGCGTCGTGCATTATACTGGAATGCTGG | LHFMVEVKGDLTAKKMVLALLELAR |
| | AAGACGGCAAGAAGGTGGACAGCAGCCGG | QDHGALDCCVVVILSHGCQASHLQF |
| | GACCGAAACAAGCCCTTCAAGTTCATGCTGG | PGAVYGTDGC |
| | GGAAGCAGGAAGTGATCCGGGGCTGGGAG | PVSVEKIVNIFNGTSCPSLGGKPKLFFI |
| | GAAGGAGTCGCACAGATGTCAGTGGGACAG | QACGGEQKDHGFEVASTSPEDESPG |
| | AGGGCCAAACTGACTATTAGCCCAGACTAC | SNPEPDA |
| | GCTTATGGAGCAACCGGCCACCCCGGGATC | TPFQEGLRTFDQLDAISSLPTPSDIFVS |
| | ATTCCCCCTCATGCTACACTGGTCTTCGATGT | YSTFPGFVSWRDPKSGSWYVETLDDI |
| | GGAGCTGCTGAAGCTGGAA-(L)- | FEQWAH |
| | AGCGGAGGAGGATCCGGA-(iCasp9)- | SEDLQSLLLRVANAVSVKGIYKQMPG |
| | GTGGACGGGTTTGGAGATGTGGGAGCCCTG | CFNFLRKKLFFKTSASRA- |
| | GAATCCCTGCGGGGCAATGCCGATCTGGCTT | EGRGSLLTCGDVEENP |
| | ACATCCTGTCTATGGAGCCTTGCGGCCACTG | GP-(T2A) |
| | TCTGATCATTAACAATGTGAACTTCTGCAGA | |
| | GAGAGCGGGCTGCGGACCAGAACAGGATC | |
| | CAATATTGACTGTGAAAAGCTGCGGAGAAG | |
| | GTTCTCTAGTCTGCACTTTATGGTCGAGGTG | |
| | AAAGGCGATCTGACCGCTAAGAAAATGGTG | |
| | CTGGCCCTGCTGGAACTGGCTCGGCAGGAC | |
| | CATGGGGCACTGGATTGCTGCGTGGTCGTG | |
| | ATCCTGAGTCACGGCTGCCAGGCTTCACATC | |
| | TGCAGTTCCCTGGGGCAGTCTATGGAACTGA | |
| | CGGCTGTCCAGTCAGCGTGGAGAAGATCGT | |
| | GAACATCTTCAACGGCACCTCTTGCCCAAGT | |
| | CTGGGCGGGAAGCCCAAACTGTTCTTTATTC | |
| | AGGCCTGTGGAGGCGAGCAGAAAGATCAC | |
| | GGCTTCGAAGTGGCTAGCACCTCCCCCGAG | |
| | GACGAATCACCTGGAAGCAACCCTGAGCCA | |
| | GATGCAACCCCCTTCCAGGAAGGCCTGAGG | |
| | ACATTTGACCAGCTGGATGCCATCTCAAGCC | |
| | TGCCCACACCTTCTGACATTTTCGTCTCTTAC | |
| | AGTACTTTCCCTGGATTTGTGAGCTGGCGCG | |
| | ATCCAAAGTCAGGCAGCTGGTACGTGGAGA | |
| | CACTGGACGATATCTTTGAGCAGTGGGCCCA | |
| | TTCTGAAGACCTGCAGAGTCTGCTGCTGCGA | |
| | GTGGCCAATGCTGTCTCTGTGAAGGGGATCT | |
| | ACAAACAGATGCCAGGATGCTTCAACTTTCT | |
| | GAGAAAGAAACTGTTCTTTAAGACCTCCGCA | |
| | TCTAGGGCC-(T2A)- | |
| | CCGCGGGAAGGCCGAGGGAGCCTGCTGAC | |
| | ATGTGGCGATGTGGAGGAAAACCCAGGACCA | |
| Fv-iCASP9 S144A-T2A | SEQ ID NO: 48 | SEQ ID NO: 49 |
| | (Fv-L)- | (Fv-L)- |
| | GTCGACGGATTTGGTGATGTCGGTGCTCTTG | VDGFGDVGALEaLRGNADLAYILSME |
| | AGgcTTTGAGGGGAAATGCAGATTTGGCTTA | PCGHCLIINNVNFCRESGLRTRTGSNI |
| | CATCCTGAGCATGGAGCCCTGTGGCCACTGC | DCEKLRRRFSSLHFMVEVKGDLTAKK |
| | CTCATTATCAACAATGTGAACTTCTGCCGTG | MVLALLELARQDHGALDCCVVVILSH |
| | AGTCCGGGCTCCGCACCCGCACTGGCTCCAA | GCQASHLQFPGAVYGTDGCPVSVEKI |
| | CATCGACTGTGAGAAGTTGCGGCGTCGCTTC | VNIFNGTSCPSLGGKPKLFFIQACGGE |
| | TCCTCGCTGCATTTCATGGTGGAGGTGAAGG | QKDHGFEVASTSPEDESPGSNPEPDA |
| | GCGACCTGACTGCCAAGAAAATGGTGCTGG | TPFQEGLRTFDQLDAISSLPTPSDIFVS |
| | CTTTGCTGGAGCTGGCGCGGCAGGACCACG | YSTFPGFVSWRDPKSGSWYVETLDDI |
| | GTGCTCTGGACTGCTGCGTGGTGGTCATTCT | FEQWAHSEDLQSLLLRVANAVSVKGI |
| | CTCTCACGGCTGTCAGGCCAGCCACCTGCAG | YKQMPGCFNFLRKKLFFKTSASRA |
| | TTCCCAGGGGCTGTCTACGGCACAGATGGA | |
| | TGCCCTGTGTCGGTCGAGAAGATTGTGAAC | |
| | ATCTTCAATGGGACCAGCTGCCCCAGCCTGG | |
| | GAGGGAAGCCCAAGCTCTTTTTCATCCAGGC | |
| | CTGTGGTGGGGAGCAGAAAGACCATGGGTT | |
| | TGAGGTGGCCTCCACTTCCCCTGAAGACGAG | |
| | TCCCCTGGCAGTAACCCCGAGCCAGATGCCA | |
| | CCCCGTTCCAGGAAGGTTTGAGGACCTTCGA | |
| | CCAGCTGGACGCCATATCTAGTTTGCCCACA | |
| | CCCAGTGACATCTTTGTGTCCTACTCTACTTT | |
| | CCCAGGTTTTGTTTCCTGGAGGGACCCCAAG | |
| | AGTGGCTCCTGGTACGTTGAGACCCTGGAC | |
| | GACATCTTTGAGCAGTGGGCTCACTCTGAAG | |
| | ACCTGCAGTCCCTCCTGCTTAGGGTCGCTAA | |
| | TGCTGTTTCGGTGAAAGGGATTTATAAACAG | |
| | ATGCCTGGTTGCTTTAATTTCCTCCGGAAAA | |
| | AACTTTTCTTTAAAACATCAGCTAGCAGAGC | |
| | C-(T2A) | |
| Fv-iCASP9 S144D-T2A | SEQ ID NO: 50 | SEQ ID NO: 51 |
| | (Fv-L)- | (Fv-L)- |
| | GTCGACGGATTTGGTGATGTCGGTGCTCTTG | VDGFGDVGALEdLRGNADLAYILSME |
| | AGgacTTGAGGGGAAATGCAGATTTGGCTTA | PCGHCLIINNVNFCRESGLRTRTGSNI |
| | CATCCTGAGCATGGAGCCCTGTGGCCACTGC | DCEKLRRRFSSLHFMVEVKGDLTAKK |
| | CTCATTATCAACAATGTGAACTTCTGCCGTG | MVLALLELARQDHGALDCCVVVILSH |
| | AGTCCGGGCTCCGCACCCGCACTGGCTCCAA | GCQASHLQFPGAVYGTDGCPVSVEKI |
| | CATCGACTGTGAGAAGTTGCGGCGTCGCTTC | VNIFNGTSCPSLGGKPKLFFIQACGGE |
| | TCCTCGCTGCATTTCATGGTGGAGGTGAAGG | QKDHGFEVASTSPEDESPGSNPEPDA |
| | GCGACCTGACTGCCAAGAAAATGGTGCTGG | TPFQEGLRTFDQLDAISSLPTPSDIFVS |
| | CTTTGCTGGAGCTGGCGCGGCAGGACCACG | YSTFPGFVSWRDPKSGSWYVETLDDI |
| | GTGCTCTGGACTGCTGCGTGGTGGTCATTCT | FEQWAHSEDLQSLLLRVANAVSVKGI |
| | CTCTCACGGCTGTCAGGCCAGCCACCTGCAG | YKQMPGCFNFLRKKLFFKTSASRA |
| | TTCCCAGGGGCTGTCTACGGCACAGATGGA | |
| | TGCCCTGTGTCGGTCGAGAAGATTGTGAAC | |
| | ATCTTCAATGGGACCAGCTGCCCCAGCCTGG | |
| | GAGGGAAGCCCAAGCTCTTTTTCATCCAGGC | |
| | CTGTGGTGGGGAGCAGAAAGACCATGGGTT | |
| | TGAGGTGGCCTCCACTTCCCCTGAAGACGAG | |
| | TCCCCTGGCAGTAACCCCGAGCCAGATGCCA | |
| | CCCCGTTCCAGGAAGGTTTGAGGACCTTCGA | |
| | CCAGCTGGACGCCATATCTAGTTTGCCCACA | |
| | CCCAGTGACATCTTTGTGTCCTACTCTACTTT | |
| | CCCAGGTTTTGTTTCCTGGAGGGACCCCAAG | |
| | AGTGGCTCCTGGTACGTTGAGACCCTGGAC | |
| | GACATCTTTGAGCAGTGGGCTCACTCTGAAG | |
| | ACCTGCAGTCCCTCCTGCTTAGGGTCGCTAA | |
| | TGCTGTTTCGGTGAAAGGGATTTATAAACAG | |
| | ATGCCTGGTTGCTTTAATTTCCTCCGGAAAA | |
| | AACTTTTCTTTAAAACATCAGCTAGCAGAGC | |
| | C-(T2A) | |
| Fv-iCASP9 S183A-T2A | SEQ ID NO: 52 | SEQ ID NO: 53 |
| | (Fv-L)- | (Fv-L)- |
| | GTCGACGGATTTGGTGATGTCGGTGCTCTTG | VDGFGDVGALESLRGNADLAYILSME |
| | AGAGTTTGAGGGGAAATGCAGATTTGGCTT | PCGHCLIINNVNFCRESGLRTRTGaNI |
| | ACATCCTGAGCATGGAGCCCTGTGGCCACTG | DCEKLRRRFSSLHFMVEVKGDLTAKK |
| | CCTCATTATCAACAATGTGAACTTCTGCCGT | MVLALLELARQDHGALDCCVVVILSH |
| | GAGTCCGGGCTCCGCACCCGCACTGGCgCCA | GCQASHLQFPGAVYGTDGCPVSVEKI |
| | ACATCGACTGTGAGAAGTTGCGGCGTCGCTT | VNIFNGTSCPSLGGKPKLFFIQACGGE |
| | CTCCTCGCTGCATTTCATGGTGGAGGTGAAG | QKDHGFEVASTSPEDESPGSNPEPDA |
| | GGCGACCTGACTGCCAAGAAAATGGTGCTG | TPFQEGLRTFDQLDAISSLPTPSDIFVS |
| | GCTTTGCTGGAGCTGGCGCGGCAGGACCAC | YSTFPGFVSWRDPKSGSWYVETLDDI |
| | GGTGCTCTGGACTGCTGCGTGGTGGTCATTC | FEQWAHSEDLQSLLLRVANAVSVKGI |
| | TCTCTCACGGCTGTCAGGCCAGCCACCTGCA | YKQMPGCFNFLRKKLFFKTSASRA- |
| | GTTCCCAGGGGCTGTCTACGGCACAGATGG | (T2A) |
| | ATGCCCTGTGTCGGTCGAGAAGATTGTGAA | |
| | CATCTTCAATGGGACCAGCTGCCCCAGCCTG | |
| | GGAGGGAAGCCCAAGCTCTTTTTCATCCAGG | |
| | CCTGTGGTGGGGAGCAGAAAGACCATGGGT | |
| | TTGAGGTGGCCTCCACTTCCCCTGAAGACGA | |
| | GTCCCCTGGCAGTAACCCCGAGCCAGATGCC | |
| | ACCCCGTTCCAGGAAGGTTTGAGGACCTTCG | |
| | ACCAGCTGGACGCCATATCTAGTTTGCCCAC | |
| | ACCCAGTGACATCTTTGTGTCCTACTCTACTT | |
| | TCCCAGGTTTTGTTTCCTGGAGGGACCCCAA | |
| | GAGTGGCTCCTGGTACGTTGAGACCCTGGA | |
| | CGACATCTTTGAGCAGTGGGCTCACTCTGAA | |
| | GACCTGCAGTCCCTCCTGCTTAGGGTCGCTA | |
| | ATGCTGTTTCGGTGAAAGGGATTTATAAACA | |
| | GATGCCTGGTTGCTTTAATTTCCTCCGGAAA | |
| | AAACTTTTCTTTAAAACATCAGCTAGCAGAG | |
| | CC-(T2A) | |
| Fv-iCASP9 S196A-T2A | SEQ ID NO: 54 | SEQ ID NO: 55 |
| | (Fv-L)- | (Fv-L)- |
| | GTCGACGGATTTGGTGATGTCGGTGCTCTTG | VDGFGDVGALESLRGNADLAYILSME |
| | AGAGTTTGAGGGGAAATGCAGATTTGGCTT | PCGHCLIINNVNFCRESGLRTRTGSNI |
| | ACATCCTGAGCATGGAGCCCTGTGGCCACTG | DCEKLRRRFSaLHFMVEVKGDLTAKK |
| | CCTCATTATCAACAATGTGAACTTCTGCCGT | MVLALLELARQDHGALDCCVVVILSH |
| | GAGTCCGGGCTCCGCACCCGCACTGGCTCCA | GCQASHLQFPGAVYGTDGCPVSVEKI |
| | ACATCGACTGTGAGAAGTTGCGGCGTCGCTT | VNIFNGTSCPSLGGKPKLFFIQACGGE |
| | CTCCgCGCTGCATTTCATGGTGGAGGTGAAG | QKDHGFEVASTSPEDESPGSNPEPDA |
| | GGCGACCTGACTGCCAAGAAAATGGTGCTG | TPFQEGLRTFDQLDAISSLPTPSDIFVS |
| | GCTTTGCTGGAGCTGGCGCGGCAGGACCAC | YSTFPGFVSWRDPKSGSWYVETLDDI |
| | GGTGCTCTGGACTGCTGCGTGGTGGTCATTC | FEQWAHSEDLQSLLLRVANAVSVKGI |
| | TCTCTCACGGCTGTCAGGCCAGCCACCTGCA | YKQMPGCFNFLRKKLFFKTSASRA- |
| | GTTCCCAGGGGCTGTCTACGGCACAGATGG | (T2A) |
| | ATGCCCTGTGTCGGTCGAGAAGATTGTGAA | |
| | CATCTTCAATGGGACCAGCTGCCCCAGCCTG | |
| | GGAGGGAAGCCCAAGCTCTTTTTCATCCAGG | |
| | CCTGTGGTGGGGAGCAGAAAGACCATGGGT | |
| | TTGAGGTGGCCTCCACTTCCCCTGAAGACGA | |
| | GTCCCCTGGCAGTAACCCCGAGCCAGATGCC | |
| | ACCCCGTTCCAGGAAGGTTTGAGGACCTTCG | |
| | ACCAGCTGGACGCCATATCTAGTTTGCCCAC | |
| | ACCCAGTGACATCTTTGTGTCCTACTCTACTT | |
| | TCCCAGGTTTTGTTTCCTGGAGGGACCCCAA | |
| | GAGTGGCTCCTGGTACGTTGAGACCCTGGA | |
| | CGACATCTTTGAGCAGTGGGCTCACTCTGAA | |
| | GACCTGCAGTCCCTCCTGCTTAGGGTCGCTA | |
| | ATGCTGTTTCGGTGAAAGGGATTTATAAACA | |
| | GATGCCTGGTTGCTTTAATTTCCTCCGGAAA | |
| | AAACTTTTCTTTAAAACATCAGCTAGCAGAG | |
| | CC-(T2A) | |
| Fv-iCASP9 S196D-T2A | SEQ ID NO: 56 | SEQ ID NO: 57 |
| | (Fv-L)- | (Fv-L)- |
| | GTCGACGGATTTGGTGATGTCGGTGCTCTTG | VDGFGDVGALESLRGNADLAYILSME |
| | AGAGTTTGAGGGGAAATGCAGATTTGGCTT | PCGHCLIINNVNFCRESGLRTRTGSNI |
| | ACATCCTGAGCATGGAGCCCTGTGGCCACTG | DCEKLRRRFSdLHFMVEVKGDLTAKK |
| | CCTCATTATCAACAATGTGAACTTCTGCCGT | MVLALLELARQDHGALDCCVVVILSH |
| | GAGTCCGGGCTCCGCACCCGCACTGGCTCCA | GCQASHLQFPGAVYGTDGCPVSVEKI |
| | ACATCGACTGTGAGAAGTTGCGGCGTCGCTT | VNIFNGTSCPSLGGKPKLFFIQACGGE |
| | CTCCgacCTGCATTTCATGGTGGAGGTGAAG | QKDHGFEVASTSPEDESPGSNPEPDA |
| | GGCGACCTGACTGCCAAGAAAATGGTGCTG | TPFQEGLRTFDQLDAISSLPTPSDIFVS |
| | GCTTTGCTGGAGCTGGCGCGGCAGGACCAC | YSTFPGFVSWRDPKSGSWYVETLDDI |
| | GGTGCTCTGGACTGCTGCGTGGTGGTCATTC | FEQWAHSEDLQSLLLRVANAVSVKGI |
| | TCTCTCACGGCTGTCAGGCCAGCCACCTGCA | YKQMPGCFNFLRKKLFFKTSASRA- |
| | GTTCCCAGGGGCTGTCTACGGCACAGATGG | (T2A) |
| | ATGCCCTGTGTCGGTCGAGAAGATTGTGAA | |
| | CATCTTCAATGGGACCAGCTGCCCCAGCCTG | |
| | GGAGGGAAGCCCAAGCTCTTTTTCATCCAGG | |
| | CCTGTGGTGGGGAGCAGAAAGACCATGGGT | |
| | TTGAGGTGGCCTCCACTTCCCCTGAAGACGA | |
| | GTCCCCTGGCAGTAACCCCGAGCCAGATGCC | |
| | ACCCCGTTCCAGGAAGGTTTGAGGACCTTCG | |
| | ACCAGCTGGACGCCATATCTAGTTTGCCCAC | |
| | ACCCAGTGACATCTTTGTGTCCTACTCTACTT | |
| | TCCCAGGTTTTGTTTCCTGGAGGGACCCCAA | |
| | GAGTGGCTCCTGGTACGTTGAGACCCTGGA | |
| | CGACATCTTTGAGCAGTGGGCTCACTCTGAA | |
| | GACCTGCAGTCCCTCCTGCTTAGGGTCGCTA | |
| | ATGCTGTTTCGGTGAAAGGGATTTATAAACA | |
| | GATGCCTGGTTGCTTTAATTTCCTCCGGAAA | |
| | AAACTTTTCTTTAAAACATCAGCTAGCAGAG | |
| | CC-(T2A) | |
| Fv-iCASP9 C285A-T2A | SEQ ID NO: 58 | SEQ ID NO: 59 |
| | (Fv-L)- | (Fv-L)- |
| | GTCGACGGATTTGGTGATGTCGGTGCTCTTG | VDGFGDVGALESLRGNADLAYILSME |
| | AGAGTTTGAGGGGAAATGCAGATTTGGCTT | PCGHCLIINNVNFCRESGLRTRTGSNI |
| | ACATCCTGAGCATGGAGCCCTGTGGCCACTG | DCEKLRRRFSSLHFMVEVKGDLTAKK |
| | CCTCATTATCAACAATGTGAACTTCTGCCGT | MVLALLELARQDHGALDCCVVVILSH |
| | GAGTCCGGGCTCCGCACCCGCACTGGCTCCA | GCQASHLQFPGAVYGTDGCPVSVEKI |
| | ACATCGACTGTGAGAAGTTGCGGCGTCGCTT | VNIFNGTSCPSLGGKPKLFFIQAaGGE |
| | CTCCTCGCTGCATTTCATGGTGGAGGTGAAG | QKDHGFEVASTSPEDESPGSNPEPDA |
| | GGCGACCTGACTGCCAAGAAAATGGTGCTG | TPFQEGLRTFDQLDAISSLPTPSDIFVS |
| | GCTTTGCTGGAGCTGGCGCGGCAGGACCAC | YSTFPGFVSWRDPKSGSWYVETLDDI |
| | GGTGCTCTGGACTGCTGCGTGGTGGTCATTC | FEQWAHSEDLQSLLLRVANAVSVKGI |
| | TCTCTCACGGCTGTCAGGCCAGCCACCTGCA | YKQMPGCFNFLRKKLFFKTSASRA- |
| | GTTCCCAGGGGCTGTCTACGGCACAGATGG | (T2A) |
| | ATGCCCTGTGTCGGTCGAGAAGATTGTGAA | |
| | CATCTTCAATGGGACCAGCTGCCCCAGCCTG | |
| | GGAGGGAAGCCCAAGCTCTTTTTCATCCAGG | |
| | CCgcgGGTGGGGAGCAGAAAGACCATGGGT | |
| | TTGAGGTGGCCTCCACTTCCCCTGAAGACGA | |
| | GTCCCCTGGCAGTAACCCCGAGCCAGATGCC | |
| | ACCCCGTTCCAGGAAGGTTTGAGGACCTTCG | |
| | ACCAGCTGGACGCCATATCTAGTTTGCCCAC | |
| | ACCCAGTGACATCTTTGTGTCCTACTCTACTT | |
| | TCCCAGGTTTTGTTTCCTGGAGGGACCCCAA | |
| | GAGTGGCTCCTGGTACGTTGAGACCCTGGA | |
| | CGACATCTTTGAGCAGTGGGCTCACTCTGAA | |
| | GACCTGCAGTCCCTCCTGCTTAGGGTCGCTA | |
| | ATGCTGTTTCGGTGAAAGGGATTTATAAACA | |
| | GATGCCTGGTTGCTTTAATTTCCTCCGGAAA | |
| | AAACTTTTCTTTAAAACATCAGCTAGCAGAG | |
| | CC-(T2A) | |
| Fv-iCASP9 A316G-T2A | SEQ ID NO: 60 | SEQ ID NO: 61 |
| | (Fv-L)- | (Fv-L)- |
| | GTCGACGGATTTGGTGATGTCGGTGCTCTTG | VDGFGDVGALESLRGNADLAYILSME |
| | AGAGTTTGAGGGGAAATGCAGATTTGGCTT | PCGHCLIINNVNFCRESGLRTRTGSNI |
| | ACATCCTGAGCATGGAGCCCTGTGGCCACTG | DCEKLRRRFSSLHFMVEVKGDLTAKK |
| | CCTCATTATCAACAATGTGAACTTCTGCCGT | MVLALLELARQDHGALDCCVVVILSH |
| | GAGTCCGGGCTCCGCACCCGCACTGGCTCCA | GCQASHLQFPGAVYGTDGCPVSVEKI |
| | ACATCGACTGTGAGAAGTTGCGGCGTCGCTT | VNIFNGTSCPSLGGKPKLFFIQACGGE |
| | CTCCTCGCTGCATTTCATGGTGGAGGTGAAG | QKDHGFEVASTSPEDESPGSNPEPDg |
| | GGCGACCTGACTGCCAAGAAAATGGTGCTG | TPFQEGLRTFDQLDAISSLPTPSDIFVS |
| | GCTTTGCTGGAGCTGGCGCGGCAGGACCAC | YSTFPGFVSWRDPKSGSWYVETLDDI |
| | GGTGCTCTGGACTGCTGCGTGGTGGTCATTC | FEQWAHSEDLQSLLLRVANAVSVKGI |
| | TCTCTCACGGCTGTCAGGCCAGCCACCTGCA | YKQMPGCFNFLRKKLFFKTSASRA- |
| | GTTCCCAGGGGCTGTCTACGGCACAGATGG | (T2A) |
| | ATGCCCTGTGTCGGTCGAGAAGATTGTGAA | |
| | CATCTTCAATGGGACCAGCTGCCCCAGCCTG | |
| | GGAGGGAAGCCCAAGCTCTTTTTCATCCAGG | |
| | CCTGTGGTGGGGAGCAGAAAGACCATGGGT | |
| | TTGAGGTGGCCTCCACTTCCCCTGAAGACGA | |
| | GTCCCCTGGCAGTAACCCCGAGCCAGATGgC | |
| | ACCCCGTTCCAGGAAGGTTTGAGGACCTTCG | |
| | ACCAGCTGGACGCCATATCTAGTTTGCCCAC | |
| | ACCCAGTGACATCTTTGTGTCCTACTCTACTT | |
| | TCCCAGGTTTTGTTTCCTGGAGGGACCCCAA | |
| | GAGTGGCTCCTGGTACGTTGAGACCCTGGA | |
| | CGACATCTTTGAGCAGTGGGCTCACTCTGAA | |
| | GACCTGCAGTCCCTCCTGCTTAGGGTCGCTA | |
| | ATGCTGTTTCGGTGAAAGGGATTTATAAACA | |
| | GATGCCTGGTTGCTTTAATTTCCTCCGGAAA | |
| | AAACTTTTCTTTAAAACATCAGCTAGCAGAG | |
| | CC-(T2A) | |
| Fv-iCASP9 T317A-T2A | SEQ ID NO: 62 | SEQ ID NO: 63 |
| | (Fv-L)- | (Fv-L)- |
| | GTCGACGGATTTGGTGATGTCGGTGCTCTTG | VDGFGDVGALESLRGNADLAYILSME |
| | AGAGTTTGAGGGGAAATGCAGATTTGGCTT | PCGHCLIINNVNFCRESGLRTRTGSNI |
| | ACATCCTGAGCATGGAGCCCTGTGGCCACTG | DCEKLRRRFSS |
| | CCTCATTATCAACAATGTGAACTTCTGCCGT | LHFMVEVKGDLTAKKMVLALLELAR |
| | GAGTCCGGGCTCCGCACCCGCACTGGCTCCA | QDHGALDCCVVVILSHGCQASHLQF |
| | ACATCGACTGTGAGAAGTTGCGGCGTCGCTT | PGAVYGTDGC |
| | CTCCTCGCTGCATTTCATGGTGGAGGTGAAG | PVSVEKIVNIFNGTSCPSLGGKPKLFFI |
| | GGCGACCTGACTGCCAAGAAAATGGTGCTG | QACGGEQKDHGFEVASTSPEDESPG |
| | GCTTTGCTGGAGCTGGCGCGGCAGGACCAC | SNPEPDA |
| | GGTGCTCTGGACTGCTGCGTGGTGGTCATTC | aPFQEGLRTFDQLDAISSLPTPSDIFVS |
| | TCTCTCACGGCTGTCAGGCCAGCCACCTGCA | YSTFPGFVSWRDPKSGSWYVETLDDI |
| | GTTCCCAGGGGCTGTCTACGGCACAGATGG | FEQWAH |
| | ATGCCCTGTGTCGGTCGAGAAGATTGTGAA | SEDLQSLLLRVANAVSVKGIYKQMPG |
| | CATCTTCAATGGGACCAGCTGCCCCAGCCTG | CFNFLRKKLFFKTSASRA- |
| | GGAGGGAAGCCCAAGCTCTTTTTCATCCAGG | (T2A) |
| | CCTGTGGTGGGGAGCAGAAAGACCATGGGT | |
| | TTGAGGTGGCCTCCACTTCCCCTGAAGACGA | |
| | GTCCCCTGGCAGTAACCCCGAGCCAGATGCC | |
| | gCCCCGTTCCAGGAAGGTTTGAGGACCTTCG | |
| | ACCAGCTGGACGCCATATCTAGTTTGCCCAC | |
| | ACCCAGTGACATCTTTGTGTCCTACTCTACTT | |
| | TCCCAGGTTTTGTTTCCTGGAGGGACCCCAA | |
| | GAGTGGCTCCTGGTACGTTGAGACCCTGGA | |
| | CGACATCTTTGAGCAGTGGGCTCACTCTGAA | |
| | GACCTGCAGTCCCTCCTGCTTAGGGTCGCTA | |
| | ATGCTGTTTCGGTGAAAGGGATTTATAAACA | |
| | GATGCCTGGTTGCTTTAATTTCCTCCGGAAA | |
| | AAACTTTTCTTTAAAACATCAGCTAGCAGAG | |
| | CC-(T2A) | |
| Fv-iCASP9 T317C-T2A | SEQ ID NO: 64 | SEQ ID NO: 65 |
| | (Fv-L)- | (Fv-L)- |
| | GTCGACGGATTTGGTGATGTCGGTGCTCTTG | VDGFGDVGALESLRGNADLAYILSME |
| | AGAGTTTGAGGGGAAATGCAGATTTGGCTT | PCGHCLIINNVNFCRESGLRTRTGSNI |
| | ACATCCTGAGCATGGAGCCCTGTGGCCACTG | DCEKLRRRFSS |
| | CCTCATTATCAACAATGTGAACTTCTGCCGT | LHFMVEVKGDLTAKKMVLALLELAR |
| | GAGTCCGGGCTCCGCACCCGCACTGGCTCCA | QDHGALDCCVVVILSHGCQASHLQF |
| | ACATCGACTGTGAGAAGTTGCGGCGTCGCTT | PGAVYGTDGC |
| | CTCCTCGCTGCATTTCATGGTGGAGGTGAAG | PVSVEKIVNIFNGTSCPSLGGKPKLFFI |
| | GGCGACCTGACTGCCAAGAAAATGGTGCTG | QACGGEQKDHGFEVASTSPEDESPG |
| | GCTTTGCTGGAGCTGGCGCGGCAGGACCAC | SNPEPDA |
| | GGTGCTCTGGACTGCTGCGTGGTGGTCATTC | cPFQEGLRTFDQLDAISSLPTPSDIFVS |
| | TCTCTCACGGCTGTCAGGCCAGCCACCTGCA | YSTFPGFVSWRDPKSGSWYVETLDDI |
| | GTTCCCAGGGGCTGTCTACGGCACAGATGG | FEQWAH |
| | ATGCCCTGTGTCGGTCGAGAAGATTGTGAA | SEDLQSLLLRVANAVSVKGIYKQMPG |
| | CATCTTCAATGGGACCAGCTGCCCCAGCCTG | CFNFLRKKLFFKTSASRA- |
| | GGAGGGAAGCCCAAGCTCTTTTTCATCCAGG | (T2A) |
| | CCTGTGGTGGGGAGCAGAAAGACCATGGGT | |
| | TTGAGGTGGCCTCCACTTCCCCTGAAGACGA | |
| | GTCCCCTGGCAGTAACCCCGAGCCAGATGCC | |
| | tgCCCGTTCCAGGAAGGTTTGAGGACCTTCG | |
| | ACCAGCTGGACGCCATATCTAGTTTGCCCAC | |
| | ACCCAGTGACATCTTTGTGTCCTACTCTACTT | |
| | TCCCAGGTTTTGTTTCCTGGAGGGACCCCAA | |
| | GAGTGGCTCCTGGTACGTTGAGACCCTGGA | |
| | CGACATCTTTGAGCAGTGGGCTCACTCTGAA | |
| | GACCTGCAGTCCCTCCTGCTTAGGGTCGCTA | |
| | ATGCTGTTTCGGTGAAAGGGATTTATAAACA | |
| | GATGCCTGGTTGCTTTAATTTCCTCCGGAAA | |
| | AAACTTTTCTTTAAAACATCAGCTAGCAGAG | |
| | CC-(T2A) | |
| Fv-iCASP9 T317S-T2A | SEQ ID NO: 66 | SEQ ID NO: 67 |
| | (Fv-L)- | (Fv-L)- |
| | GTCGACGGATTTGGTGATGTCGGTGCTCTTG | VDGFGDVGALESLRGNADLAYILSME |
| | AGAGTTTGAGGGGAAATGCAGATTTGGCTT | PCGHCLIINNVNFCRESGLRTRTGSNI |
| | ACATCCTGAGCATGGAGCCCTGTGGCCACTG | DCEKLRRRFSS |
| | CCTCATTATCAACAATGTGAACTTCTGCCGT | LHFMVEVKGDLTAKKMVLALLELAR |
| | GAGTCCGGGCTCCGCACCCGCACTGGCTCCA | QDHGALDCCVVVILSHGCQASHLQF |
| | ACATCGACTGTGAGAAGTTGCGGCGTCGCTT | PGAVYGTDGC |
| | CTCCTCGCTGCATTTCATGGTGGAGGTGAAG | PVSVEKIVNIFNGTSCPSLGGKPKLFFI |
| | GGCGACCTGACTGCCAAGAAAATGGTGCTG | QACGGEQKDHGFEVASTSPEDESPG |
| | GCTTTGCTGGAGCTGGCGCGGCAGGACCAC | SNPEPDA |
| | GGTGCTCTGGACTGCTGCGTGGTGGTCATTC | sPFQEGLRTFDQLDAISSLPTPSDIFVS |
| | TCTCTCACGGCTGTCAGGCCAGCCACCTGCA | YSTFPGFVSWRDPKSGSWYVETLDDI |
| | GTTCCCAGGGGCTGTCTACGGCACAGATGG | FEQWAH |
| | ATGCCCTGTGTCGGTCGAGAAGATTGTGAA | SEDLQSLLLRVANAVSVKGIYKQMPG |
| | CATCTTCAATGGGACCAGCTGCCCCAGCCTG | CFNFLRKKLFFKTSASRA- |
| | GGAGGGAAGCCCAAGCTCTTTTTCATCCAGG | (T2A) |
| | CCTGTGGTGGGGAGCAGAAAGACCATGGGT | |
| | TTGAGGTGGCCTCCACTTCCCCTGAAGACGA | |
| | GTCCCCTGGCAGTAACCCCGAGCCAGATGCC | |
| | tCCCCGTTCCAGGAAGGTTTGAGGACCTTCG | |
| | ACCAGCTGGACGCCATATCTAGTTTGCCCAC | |
| | ACCCAGTGACATCTTTGTGTCCTACTCTACTT | |
| | TCCCAGGTTTTGTTTCCTGGAGGGACCCCAA | |
| | GAGTGGCTCCTGGTACGTTGAGACCCTGGA | |
| | CGACATCTTTGAGCAGTGGGCTCACTCTGAA | |
| | GACCTGCAGTCCCTCCTGCTTAGGGTCGCTA | |
| | ATGCTGTTTCGGTGAAAGGGATTTATAAACA | |
| | GATGCCTGGTTGCTTTAATTTCCTCCGGAAA | |
| | AAACTTTTCTTTAAAACATCAGCTAGCAGAG | |
| | CC-(T2A) | |
| Fv-iCASP9 F326K-T2A | SEQ ID NO: 68 | SEQ ID NO: 69 |
| | (Fv-L)- | (Fv-L)- |
| | GTCGACGGATTTGGTGATGTCGGTGCTCTTG | VDGFGDVGALESLRGNADLAYILSME |
| | AGAGTTTGAGGGGAAATGCAGATTTGGCTT | PCGHCLIINNVNFCRESGLRTRTGSNI |
| | ACATCCTGAGCATGGAGCCCTGTGGCCACTG | DCEKLRRRFSSLHFMVEVKGDLTAKK |
| | CCTCATTATCAACAATGTGAACTTCTGCCGT | MVLALLELARQDHGALDCCVVVILSH |
| | GAGTCCGGGCTCCGCACCCGCACTGGCTCCA | GCQASHLQFPGAVYGTDGCPVSVEKI |
| | ACATCGACTGTGAGAAGTTGCGGCGTCGCTT | VNIFNGTSCPSLGGKPKLFFIQACGGE |
| | CTCCTCGCTGCATTTCATGGTGGAGGTGAAG | QKDHGFEVASTSPEDESPGSNPEPDA |
| | GGCGACCTGACTGCCAAGAAAATGGTGCTG | TPFQEGLRTkDQLDAISSLPTPSDIFVS |
| | GCTTTGCTGGAGCTGGCGCGGCAGGACCAC | YSTFPGFVSWRDPKSGSWYVETLDDI |
| | GGTGCTCTGGACTGCTGCGTGGTGGTCATTC | FEQWAHSEDLQSLLLRVANAVSVKGI |
| | TCTCTCACGGCTGTCAGGCCAGCCACCTGCA | YKQMPGCFNFLRKKLFFKTSASRA |
| | GTTCCCAGGGGCTGTCTACGGCACAGATGG | |
| | ATGCCCTGTGTCGGTCGAGAAGATTGTGAA | |
| | CATCTTCAATGGGACCAGCTGCCCCAGCCTG | |
| | GGAGGGAAGCCCAAGCTCTTTTTCATCCAGG | |
| | CCTGTGGTGGGGAGCAGAAAGACCATGGGT | |
| | TTGAGGTGGCCTCCACTTCCCCTGAAGACGA | |
| | GTCCCCTGGCAGTAACCCCGAGCCAGATGCC | |
| | ACCCCGTTCCAGGAAGGTTTGAGGACCaagG | |
| | ACCAGCTGGACGCCATATCTAGTTTGCCCAC | |
| | ACCCAGTGACATCTTTGTGTCCTACTCTACTT | |
| | TCCCAGGTTTTGTTTCCTGGAGGGACCCCAA | |
| | GAGTGGCTCCTGGTACGTTGAGACCCTGGA | |
| | CGACATCTTTGAGCAGTGGGCTCACTCTGAA | |
| | GACCTGCAGTCCCTCCTGCTTAGGGTCGCTA | |
| | ATGCTGTTTCGGTGAAAGGGATTTATAAACA | |
| | GATGCCTGGTTGCTTTAATTTCCTCCGGAAA | |
| | AAACTTTTCTTTAAAACATCAGCTAGCAGAG | |
| | CC | |
| Fv-iCASP9 D327K-T2A | SEQ ID NO: 70 | SEQ ID NO: 71 |
| | (Fv-L)- | (Fv-L)- |
| | GTCGACGGATTTGGTGATGTCGGTGCTCTTG | VDGFGDVGALESLRGNADLAYILSME |
| | AGAGTTTGAGGGGAAATGCAGATTTGGCTT | PCGHCLIINNVNFCRESGLRTRTGSNI |
| | ACATCCTGAGCATGGAGCCCTGTGGCCACTG | DCEKLRRRFSSLHFMVEVKGDLTAKK |
| | CCTCATTATCAACAATGTGAACTTCTGCCGT | MVLALLELARQDHGALDCCVVVILSH |
| | GAGTCCGGGCTCCGCACCCGCACTGGCTCCA | GCQASHLQFPGAVYGTDGCPVSVEKI |
| | ACATCGACTGTGAGAAGTTGCGGCGTCGCTT | VNIFNGTSCPSLGGKPKLFFIQACGGE |
| | CTCCTCGCTGCATTTCATGGTGGAGGTGAAG | QKDHGFEVASTSPEDESPGSNPEPDA |
| | GGCGACCTGACTGCCAAGAAAATGGTGCTG | TPFQEGLRTFkQLDAISSLPTPSDIFVS |
| | GCTTTGCTGGAGCTGGCGCGGCAGGACCAC | YSTFPGFVSWRDPKSGSWYVETLDDI |
| | GGTGCTCTGGACTGCTGCGTGGTGGTCATTC | FEQWAHSEDLQSLLLRVANAVSVKGI |
| | TCTCTCACGGCTGTCAGGCCAGCCACCTGCA | YKQMPGCFNFLRKKLFFKTSASRA- |
| | GTTCCCAGGGGCTGTCTACGGCACAGATGG | (T2A) |
| | ATGCCCTGTGTCGGTCGAGAAGATTGTGAA | |
| | CATCTTCAATGGGACCAGCTGCCCCAGCCTG | |
| | GGAGGGAAGCCCAAGCTCTTTTTCATCCAGG | |
| | CCTGTGGTGGGGAGCAGAAAGACCATGGGT | |
| | TTGAGGTGGCCTCCACTTCCCCTGAAGACGA | |
| | GTCCCCTGGCAGTAACCCCGAGCCAGATGCC | |
| | ACCCCGTTCCAGGAAGGTTTGAGGACCTTCa | |
| | AgCAGCTGGACGCCATATCTAGTTTGCCCAC | |
| | ACCCAGTGACATCTTTGTGTCCTACTCTACTT | |
| | TCCCAGGTTTTGTTTCCTGGAGGGACCCCAA | |
| | GAGTGGCTCCTGGTACGTTGAGACCCTGGA | |
| | CGACATCTTTGAGCAGTGGGCTCACTCTGAA | |
| | GACCTGCAGTCCCTCCTGCTTAGGGTCGCTA | |
| | ATGCTGTTTCGGTGAAAGGGATTTATAAACA | |
| | GATGCCTGGTTGCTTTAATTTCCTCCGGAAA | |
| | AAACTTTTCTTTAAAACATCAGCTAGCAGAG | |
| | CC-(T2A) | |
| Fv-iCASP9 D327R-T2A | SEQ ID NO: 72 | SEQ ID NO: 73 |
| | GTCGACGGATTTGGTGATGTCGGTGCTCTTG | (Fv-L)- |
| | AGAGTTTGAGGGGAAATGCAGATTTGGCTT | VDGFGDVGALESLRGNADLAYILSME |
| | ACATCCTGAGCATGGAGCCCTGTGGCCACTG | PCGHCLIINNVNFCRESGLRTRTGSNI |
| | CCTCATTATCAACAATGTGAACTTCTGCCGT | DCEKLRRRFSSLHFMVEVKGDLTAKK |
| | GAGTCCGGGCTCCGCACCCGCACTGGCTCCA | MVLALLELARQDHGALDCCVVVILSH |
| | ACATCGACTGTGAGAAGTTGCGGCGTCGCTT | GCQASHLQFPGAVYGTDGCPVSVEKI |
| | CTCCTCGCTGCATTTCATGGTGGAGGTGAAG | VNIFNGTSCPSLGGKPKLFFIQACGGE |
| | GGCGACCTGACTGCCAAGAAAATGGTGCTG | QKDHGFEVASTSPEDESPGSNPEPDA |
| | GCTTTGCTGGAGCTGGCGCGGCAGGACCAC | TPFQEGLRTFrQLDAISSLPTPSDIFVSY |
| | GGTGCTCTGGACTGCTGCGTGGTGGTCATTC | STFPGFVSWRDPKSGSWYVETLDDIF |
| | TCTCTCACGGCTGTCAGGCCAGCCACCTGCA | EQWAHSEDLQSLLLRVANAVSVKGIY |
| | GTTCCCAGGGGCTGTCTACGGCACAGATGG | KQMPGCFNFLRKKLFFKTSASRA- |
| | ATGCCCTGTGTCGGTCGAGAAGATTGTGAA | (T2A) |
| | CATCTTCAATGGGACCAGCTGCCCCAGCCTG | |
| | GGAGGGAAGCCCAAGCTCTTTTTCATCCAGG | |
| | CCTGTGGTGGGGAGCAGAAAGACCATGGGT | |
| | TTGAGGTGGCCTCCACTTCCCCTGAAGACGA | |
| | GTCCCCTGGCAGTAACCCCGAGCCAGATGCC | |
| | ACCCCGTTCCAGGAAGGTTTGAGGACCTTCa | |
| | ggCAGCTGGACGCCATATCTAGTTTGCCCAC | |
| | ACCCAGTGACATCTTTGTGTCCTACTCTACTT | |
| | TCCCAGGTTTTGTTTCCTGGAGGGACCCCAA | |
| | GAGTGGCTCCTGGTACGTTGAGACCCTGGA | |
| | CGACATCTTTGAGCAGTGGGCTCACTCTGAA | |
| | GACCTGCAGTCCCTCCTGCTTAGGGTCGCTA | |
| | ATGCTGTTTCGGTGAAAGGGATTTATAAACA | |
| | GATGCCTGGTTGCTTTAATTTCCTCCGGAAA | |
| | AAACTTTTCTTTAAAACATCAGCTAGCAGAG | |
| | CC-(T2A) | |
| Fv-iCASP9 D327G- | SEQ ID NO: 74 | SEQ ID NO: 75 |
| T2A | GTCGACGGATTTGGTGATGTCGGTGCTCTTG | (Fv-L)- |
| | AGAGTTTGAGGGGAAATGCAGATTTGGCTT | VDGFGDVGALESLRGNADLAYILSME |
| | ACATCCTGAGCATGGAGCCCTGTGGCCACTG | PCGHCLIINNVNFCRESGLRTRTGSNI |
| | CCTCATTATCAACAATGTGAACTTCTGCCGT | DCEKLRRRFSSLHFMVEVKGDLTAKK |
| | GAGTCCGGGCTCCGCACCCGCACTGGCTCCA | MVLALLELARQDHGALDCCVVVILSH |
| | ACATCGACTGTGAGAAGTTGCGGCGTCGCTT | GCQASHLQFPGAVYGTDGCPVSVEKI |
| | CTCCTCGCTGCATTTCATGGTGGAGGTGAAG | VNIFNGTSCPSLGGKPKLFFIQACGGE |
| | GGCGACCTGACTGCCAAGAAAATGGTGCTG | QKDHGFEVASTSPEDESPGSNPEPDA |
| | GCTTTGCTGGAGCTGGCGCGGCAGGACCAC | TPFQEGLRTFgQLDAISSLPTPSDIFVS |
| | GGTGCTCTGGACTGCTGCGTGGTGGTCATTC | YSTFPGFVSWRDPKSGSWYVETLDDI |
| | TCTCTCACGGCTGTCAGGCCAGCCACCTGCA | FEQWAHSEDLQSLLLRVANAVSVKGI |
| | GTTCCCAGGGGCTGTCTACGGCACAGATGG | YKQMPGCFNFLRKKLFFKTSASRA- |
| | ATGCCCTGTGTCGGTCGAGAAGATTGTGAA | (T2A) |
| | CATCTTCAATGGGACCAGCTGCCCCAGCCTG | |
| | GGAGGGAAGCCCAAGCTCTTTTTCATCCAGG | |
| | CCTGTGGTGGGGAGCAGAAAGACCATGGGT | |
| | TTGAGGTGGCCTCCACTTCCCCTGAAGACGA | |
| | GTCCCCTGGCAGTAACCCCGAGCCAGATGCC | |
| | ACCCCGTTCCAGGAAGGTTTGAGGACCTTCG | |
| | gCCAGCTGGACGCCATATCTAGTTTGCCCAC | |
| | ACCCAGTGACATCTTTGTGTCCTACTCTACTT | |
| | TCCCAGGTTTTGTTTCCTGGAGGGACCCCAA | |
| | GAGTGGCTCCTGGTACGTTGAGACCCTGGA | |
| | CGACATCTTTGAGCAGTGGGCTCACTCTGAA | |
| | GACCTGCAGTCCCTCCTGCTTAGGGTCGCTA | |
| | ATGCTGTTTCGGTGAAAGGGATTTATAAACA | |
| | GATGCCTGGTTGCTTTAATTTCCTCCGGAAA | |
| | AAACTTTTCTTTAAAACATCAGCTAGCAGAG | |
| | CC-(T2A) | |
| Fv-iCASP9 Q328K-T2A | SEQ ID NO: 76 | SEQ ID NO: 77 |
| | (Fv-L)- | VDGFGDVGALESLRGNADLAYILSME |
| | GTCGACGGATTTGGTGATGTCGGTGCTCTTG | PCGHCLIINNVNFCRESGLRTRTGSNI |
| | AGAGTTTGAGGGGAAATGCAGATTTGGCTT | DCEKLRRRFSSLHFMVEVKGDLTAKK |
| | ACATCCTGAGCATGGAGCCCTGTGGCCACTG | MVLALLELARQDHGALDCCVVVILSH |
| | CCTCATTATCAACAATGTGAACTTCTGCCGT | GCQASHLQFPGAVYGTDGCPVSVEKI |
| | GAGTCCGGGCTCCGCACCCGCACTGGCTCCA | VNIFNGTSCPSLGGKPKLFFIQACGGE |
| | ACATCGACTGTGAGAAGTTGCGGCGTCGCTT | QKDHGFEVASTSPEDESPGSNPEPDA |
| | CTCCTCGCTGCATTTCATGGTGGAGGTGAAG | TPFQEGLRTFDkLDAISSLPTPSDIFVS |
| | GGCGACCTGACTGCCAAGAAAATGGTGCTG | YSTFPGFVSWRDPKSGSWYVETLDDI |
| | GCTTTGCTGGAGCTGGCGCGGCAGGACCAC | FEQWAHSEDLQSLLLRVANAVSVKGI |
| | GGTGCTCTGGACTGCTGCGTGGTGGTCATTC | YKQMPGCFNFLRKKLFFKTSASRA- |
| | TCTCTCACGGCTGTCAGGCCAGCCACCTGCA | (T2A) |
| | GTTCCCAGGGGCTGTCTACGGCACAGATGG | |
| | ATGCCCTGTGTCGGTCGAGAAGATTGTGAA | |
| | CATCTTCAATGGGACCAGCTGCCCCAGCCTG | |
| | GGAGGGAAGCCCAAGCTCTTTTTCATCCAGG | |
| | CCTGTGGTGGGGAGCAGAAAGACCATGGGT | |
| | TTGAGGTGGCCTCCACTTCCCCTGAAGACGA | |
| | GTCCCCTGGCAGTAACCCCGAGCCAGATGCC | |
| | ACCCCGTTCCAGGAAGGTTTGAGGACCTTCG | |
| | ACaAGCTGGACGCCATATCTAGTTTGCCCAC | |
| | ACCCAGTGACATCTTTGTGTCCTACTCTACTT | |
| | TCCCAGGTTTTGTTTCCTGGAGGGACCCCAA | |
| | GAGTGGCTCCTGGTACGTTGAGACCCTGGA | |
| | CGACATCTTTGAGCAGTGGGCTCACTCTGAA | |
| | GACCTGCAGTCCCTCCTGCTTAGGGTCGCTA | |
| | ATGCTGTTTCGGTGAAAGGGATTTATAAACA | |
| | GATGCCTGGTTGCTTTAATTTCCTCCGGAAA | |
| | AAACTTTTCTTTAAAACATCAGCTAGCAGAG | |
| | CC-(T2A) | |
| Fv-iCASP9 Q328R-T2A | SEQ ID NO: 78 | SEQ ID NO: 79 |
| | (Fv-L)- | (Fv-L)- |
| | GTCGACGGATTTGGTGATGTCGGTGCTCTTG | VDGFGDVGALESLRGNADLAYILSME |
| | AGAGTTTGAGGGGAAATGCAGATTTGGCTT | PCGHCLIINNVNFCRESGLRTRTGSNI |
| | ACATCCTGAGCATGGAGCCCTGTGGCCACTG | DCEKLRRRFSSLHFMVEVKGDLTAKK |
| | CCTCATTATCAACAATGTGAACTTCTGCCGT | MVLALLELARQDHGALDCCVVVILSH |
| | GAGTCCGGGCTCCGCACCCGCACTGGCTCCA | GCQASHLQFPGAVYGTDGCPVSVEKI |
| | ACATCGACTGTGAGAAGTTGCGGCGTCGCTT | VNIFNGTSCPSLGGKPKLFFIQACGGE |
| | CTCCTCGCTGCATTTCATGGTGGAGGTGAAG | QKDHGFEVASTSPEDESPGSNPEPDA |
| | GGCGACCTGACTGCCAAGAAAATGGTGCTG | TPFQEGLRTFDrLDAISSLPTPSDIFVSY |
| | GCTTTGCTGGAGCTGGCGCGGCAGGACCAC | STFPGFVSWRDPKSGSWYVETLDDIF |
| | GGTGCTCTGGACTGCTGCGTGGTGGTCATTC | EQWAHSEDLQSLLLRVANAVSVKGIY |
| | TCTCTCACGGCTGTCAGGCCAGCCACCTGCA | KQMPGCFNFLRKKLFFKTSASRA- |
| | GTTCCCAGGGGCTGTCTACGGCACAGATGG | (T2A) |
| | ATGCCCTGTGTCGGTCGAGAAGATTGTGAA | |
| | CATCTTCAATGGGACCAGCTGCCCCAGCCTG | |
| | GGAGGGAAGCCCAAGCTCTTTTTCATCCAGG | |
| | CCTGTGGTGGGGAGCAGAAAGACCATGGGT | |
| | TTGAGGTGGCCTCCACTTCCCCTGAAGACGA | |
| | GTCCCCTGGCAGTAACCCCGAGCCAGATGCC | |
| | ACCCCGTTCCAGGAAGGTTTGAGGACCTTCG | |
| | ACagGCTGGACGCCATATCTAGTTTGCCCAC | |
| | ACCCAGTGACATCTTTGTGTCCTACTCTACTT | |
| | TCCCAGGTTTTGTTTCCTGGAGGGACCCCAA | |
| | GAGTGGCTCCTGGTACGTTGAGACCCTGGA | |
| | CGACATCTTTGAGCAGTGGGCTCACTCTGAA | |
| | GACCTGCAGTCCCTCCTGCTTAGGGTCGCTA | |
| | ATGCTGTTTCGGTGAAAGGGATTTATAAACA | |
| | GATGCCTGGTTGCTTTAATTTCCTCCGGAAA | |
| | AAACTTTTCTTTAAAACATCAGCTAGCAGAG | |
| | CC-(T2A) | |
| Fv-iCASP9 L329K-T2A | SEQ ID NO: 80 | SEQ ID NO: 81 |
| | (Fv-L)- | (Fv-L)- |
| | GTCGACGGATTTGGTGATGTCGGTGCTCTTG | VDGFGDVGALESLRGNADLAYILSME |
| | AGAGTTTGAGGGGAAATGCAGATTTGGCTT | PCGHCLIINNVNFCRESGLRTRTGSNI |
| | ACATCCTGAGCATGGAGCCCTGTGGCCACTG | DCEKLRRRFSSLHFMVEVKGDLTAKK |
| | CCTCATTATCAACAATGTGAACTTCTGCCGT | MVLALLELARQDHGALDCCVVVILSH |
| | GAGTCCGGGCTCCGCACCCGCACTGGCTCCA | GCQASHLQFPGAVYGTDGCPVSVEKI |
| | ACATCGACTGTGAGAAGTTGCGGCGTCGCTT | VNIFNGTSCPSLGGKPKLFFIQACGGE |
| | CTCCTCGCTGCATTTCATGGTGGAGGTGAAG | QKDHGFEVASTSPEDESPGSNPEPDA |
| | GGCGACCTGACTGCCAAGAAAATGGTGCTG | TPFQEGLRTFDQkDAISSLPTPSDIFVS |
| | GCTTTGCTGGAGCTGGCGCGGCAGGACCAC | YSTFPGFVSWRDPKSGSWYVETLDDI |
| | GGTGCTCTGGACTGCTGCGTGGTGGTCATTC | FEQWAHSEDLQSLLLRVANAVSVKGI |
| | TCTCTCACGGCTGTCAGGCCAGCCACCTGCA | YKQMPGCFNFLRKKLFFKTSASRA |
| | GTTCCCAGGGGCTGTCTACGGCACAGATGG | |
| | ATGCCCTGTGTCGGTCGAGAAGATTGTGAA | |
| | CATCTTCAATGGGACCAGCTGCCCCAGCCTG | |
| | GGAGGGAAGCCCAAGCTCTTTTTCATCCAGG | |
| | CCTGTGGTGGGGAGCAGAAAGACCATGGGT | |
| | TTGAGGTGGCCTCCACTTCCCCTGAAGACGA | |
| | GTCCCCTGGCAGTAACCCCGAGCCAGATGCC | |
| | ACCCCGTTCCAGGAAGGTTTGAGGACCTTCG | |
| | ACCAGaaGGACGCCATATCTAGTTTGCCCAC | |
| | ACCCAGTGACATCTTTGTGTCCTACTCTACTT | |
| | TCCCAGGTTTTGTTTCCTGGAGGGACCCCAA | |
| | GAGTGGCTCCTGGTACGTTGAGACCCTGGA | |
| | CGACATCTTTGAGCAGTGGGCTCACTCTGAA | |
| | GACCTGCAGTCCCTCCTGCTTAGGGTCGCTA | |
| | ATGCTGTTTCGGTGAAAGGGATTTATAAACA | |
| | GATGCCTGGTTGCTTTAATTTCCTCCGGAAA | |
| | AAACTTTTCTTTAAAACATCAGCTAGCAGAG | |
| | CC | |
| Fv-iCASP9 L329E-T2A | SEQ ID NO: 82 | SEQ ID NO: 83 |
| | (Fv-L)- | (Fv-L)- |
| | GTCGACGGATTTGGTGATGTCGGTGCTCTTG | VDGFGDVGALESLRGNADLAYILSME |
| | AGAGTTTGAGGGGAAATGCAGATTTGGCTT | PCGHCLIINNVNFCRESGLRTRTGSNI |
| | ACATCCTGAGCATGGAGCCCTGTGGCCACTG | DCEKLRRRFSSLHFMVEVKGDLTAKK |
| | CCTCATTATCAACAATGTGAACTTCTGCCGT | MVLALLELARQDHGALDCCVVVILSH |
| | GAGTCCGGGCTCCGCACCCGCACTGGCTCCA | GCQASHLQFPGAVYGTDGCPVSVEKI |
| | ACATCGACTGTGAGAAGTTGCGGCGTCGCTT | VNIFNGTSCPSLGGKPKLFFIQACGGE |
| | CTCCTCGCTGCATTTCATGGTGGAGGTGAAG | QKDHGFEVASTSPEDESPGSNPEPDA |
| | GGCGACCTGACTGCCAAGAAAATGGTGCTG | TPFQEGLRTFDQeDAISSLPTPSDIFVS |
| | GCTTTGCTGGAGCTGGCGCGGCAGGACCAC | YSTFPGFVSWRDPKSGSWYVETLDDI |
| | GGTGCTCTGGACTGCTGCGTGGTGGTCATTC | FEQWAHSEDLQSLLLRVANAVSVKGI |
| | TCTCTCACGGCTGTCAGGCCAGCCACCTGCA | YKQMPGCFNFLRKKLFFKTSASRA- |
| | GTTCCCAGGGGCTGTCTACGGCACAGATGG | (T2A) |
| | ATGCCCTGTGTCGGTCGAGAAGATTGTGAA | |
| | CATCTTCAATGGGACCAGCTGCCCCAGCCTG | |
| | GGAGGGAAGCCCAAGCTCTTTTTCATCCAGG | |
| | CCTGTGGTGGGGAGCAGAAAGACCATGGGT | |
| | TTGAGGTGGCCTCCACTTCCCCTGAAGACGA | |
| | GTCCCCTGGCAGTAACCCCGAGCCAGATGCC | |
| | ACCCCGTTCCAGGAAGGTTTGAGGACCTTCG | |
| | ACCAGgaGGACGCCATATCTAGTTTGCCCAC | |
| | ACCCAGTGACATCTTTGTGTCCTACTCTACTT | |
| | TCCCAGGTTTTGTTTCCTGGAGGGACCCCAA | |
| | GAGTGGCTCCTGGTACGTTGAGACCCTGGA | |
| | CGACATCTTTGAGCAGTGGGCTCACTCTGAA | |
| | GACCTGCAGTCCCTCCTGCTTAGGGTCGCTA | |
| | ATGCTGTTTCGGTGAAAGGGATTTATAAACA | |
| | GATGCCTGGTTGCTTTAATTTCCTCCGGAAA | |
| | AAACTTTTCTTTAAAACATCAGCTAGCAGAG | |
| | CC-(T2A) | |
| Fv-iCASP9 L329G-T2A | SEQ ID NO: 84 | SEQ ID NO: 85 |
| | GTCGACGGATTTGGTGATGTCGGTGCTCTTG | VDGFGDVGALESLRGNADLAYILSME |
| | AGAGTTTGAGGGGAAATGCAGATTTGGCTT | PCGHCLIINNVNFCRESGLRTRTGSNI |
| | ACATCCTGAGCATGGAGCCCTGTGGCCACTG | DCEKLRRRFSSLHFMVEVKGDLTAKK |
| | CCTCATTATCAACAATGTGAACTTCTGCCGT | MVLALLELARQDHGALDCCVVVILSH |
| | GAGTCCGGGCTCCGCACCCGCACTGGCTCCA | GCQASHLQFPGAVYGTDGCPVSVEKI |
| | ACATCGACTGTGAGAAGTTGCGGCGTCGCTT | VNIFNGTSCPSLGGKPKLFFIQACGGE |
| | CTCCTCGCTGCATTTCATGGTGGAGGTGAAG | QKDHGFEVASTSPEDESPGSNPEPDA |
| | GGCGACCTGACTGCCAAGAAAATGGTGCTG | TPFQEGLRTFDQgDAISSLPTPSDIFVS |
| | GCTTTGCTGGAGCTGGCGCGGCAGGACCAC | YSTFPGFVSWRDPKSGSWYVETLDDI |
| | GGTGCTCTGGACTGCTGCGTGGTGGTCATTC | FEQWAHSEDLQSLLLRVANAVSVKGI |
| | TCTCTCACGGCTGTCAGGCCAGCCACCTGCA | YKQMPGCFNFLRKKLFFKTSASRA |
| | GTTCCCAGGGGCTGTCTACGGCACAGATGG | |
| | ATGCCCTGTGTCGGTCGAGAAGATTGTGAA | |
| | CATCTTCAATGGGACCAGCTGCCCCAGCCTG | |
| | GGAGGGAAGCCCAAGCTCTTTTTCATCCAGG | |
| | CCTGTGGTGGGGAGCAGAAAGACCATGGGT | |
| | TTGAGGTGGCCTCCACTTCCCCTGAAGACGA | |
| | GTCCCCTGGCAGTAACCCCGAGCCAGATGCC | |
| | ACCCCGTTCCAGGAAGGTTTGAGGACCTTCG | |
| | ACCAGggcGACGCCATATCTAGTTTGCCCACA | |
| | CCCAGTGACATCTTTGTGTCCTACTCTACTTT | |
| | CCCAGGTTTTGTTTCCTGGAGGGACCCCAAG | |
| | AGTGGCTCCTGGTACGTTGAGACCCTGGAC | |
| | GACATCTTTGAGCAGTGGGCTCACTCTGAAG | |
| | ACCTGCAGTCCCTCCTGCTTAGGGTCGCTAA | |
| | TGCTGTTTCGGTGAAAGGGATTTATAAACAG | |
| | ATGCCTGGTTGCTTTAATTTCCTCCGGAAAA | |
| | AACTTTTCTTTAAAACATCAGCTAGCAGAGCC | |
| Fv-L-Caspase9 | SEQ ID NO: 86 | SEQ ID NO: 87 |
| D330A-T2A | (Fv-L)- | (Fv-L)- |
| | GTCGACGGATTTGGTGATGTCGGTGCTCTTG | VDGFGDVGALESLRGNADLAYILSME |
| | AGAGTTTGAGGGGAAATGCAGATTTGGCTT | PCGHCLIINNVNFCRESGLRTRTGSNI |
| | ACATCCTGAGCATGGAGCCCTGTGGCCACTG | DCEKLRRRFSS |
| | CCTCATTATCAACAATGTGAACTTCTGCCGT | LHFMVEVKGDLTAKKMVLALLELAR |
| | GAGTCCGGGCTCCGCACCCGCACTGGCTCCA | QDHGALDCCVVVILSHGCQASHLQF |
| | ACATCGACTGTGAGAAGTTGCGGCGTCGCTT | PGAVYGTDGC |
| | CTCCTCGCTGCATTTCATGGTGGAGGTGAAG | PVSVEKIVNIFNGTSCPSLGGKPKLFFI |
| | GGCGACCTGACTGCCAAGAAAATGGTGCTG | QACGGEQKDHGFEVASTSPEDESPG |
| | GCTTTGCTGGAGCTGGCGCGGCAGGACCAC | SNPEPDA |
| | GGTGCTCTGGACTGCTGCGTGGTGGTCATTC | TPFQEGLRTFDQLaAISSLPTPSDIFVS |
| | TCTCTCACGGCTGTCAGGCCAGCCACCTGCA | YSTFPGFVSWRDPKSGSWYVETLDDI |
| | GTTCCCAGGGGCTGTCTACGGCACAGATGG | FEQWAH |
| | ATGCCCTGTGTCGGTCGAGAAGATTGTGAA | SEDLQSLLLRVANAVSVKGIYKQMPG |
| | CATCTTCAATGGGACCAGCTGCCCCAGCCTG | CFNFLRKKLFFKTSASRA-(T2A) |
| | GGAGGGAAGCCCAAGCTCTTTTTCATCCAGG | |
| | CCTGTGGTGGGGAGCAGAAAGACCATGGGT | |
| | TTGAGGTGGCCTCCACTTCCCCTGAAGACGA | |
| | GTCCCCTGGCAGTAACCCCGAGCCAGATGCC | |
| | ACCCCGTTCCAGGAAGGTTTGAGGACCTTCG | |
| | ACCAGCTGGcCGCCATATCTAGTTTGCCCAC | |
| | ACCCAGTGACATCTTTGTGTCCTACTCTACTT | |
| | TCCCAGGTTTTGTTTCCTGGAGGGACCCCAA | |
| | GAGTGGCTCCTGGTACGTTGAGACCCTGGA | |
| | CGACATCTTTGAGCAGTGGGCTCACTCTGAA | |
| | GACCTGCAGTCCCTCCTGCTTAGGGTCGCTA | |
| | ATGCTGTTTCGGTGAAAGGGATTTATAAACA | |
| | GATGCCTGGTTGCTTTAATTTCCTCCGGAAA | |
| | AAACTTTTCTTTAAAACATCAGCTAGCAGAG | |
| | CC-(T2A) | |
| Fv-L-Caspase9 D330E- | SEQ ID NO: 88 | SEQ ID NO: 89 |
| T2A | (Fv-L)- | (Fv-L)- |
| | GTCGACGGATTTGGTGATGTCGGTGCTCTTG | VDGFGDVGALESLRGNADLAYILSME |
| | AGAGTTTGAGGGGAAATGCAGATTTGGCTT | PCGHCLIINNVNFCRESGLRTRTGSNI |
| | ACATCCTGAGCATGGAGCCCTGTGGCCACTG | DCEKLRRRFSS |
| | CCTCATTATCAACAATGTGAACTTCTGCCGT | LHFMVEVKGDLTAKKMVLALLELAR |
| | GAGTCCGGGCTCCGCACCCGCACTGGCTCCA | QDHGALDCCVVVILSHGCQASHLQF |
| | ACATCGACTGTGAGAAGTTGCGGCGTCGCTT | PGAVYGTDGC |
| | CTCCTCGCTGCATTTCATGGTGGAGGTGAAG | PVSVEKIVNIFNGTSCPSLGGKPKLFFI |
| | GGCGACCTGACTGCCAAGAAAATGGTGCTG | QACGGEQKDHGFEVASTSPEDESPG |
| | GCTTTGCTGGAGCTGGCGCGGCAGGACCAC | SNPEPDA |
| | GGTGCTCTGGACTGCTGCGTGGTGGTCATTC | TPFQEGLRTFDQLeAISSLPTPSDIFVS |
| | TCTCTCACGGCTGTCAGGCCAGCCACCTGCA | YSTFPGFVSWRDPKSGSWYVETLDDI |
| | GTTCCCAGGGGCTGTCTACGGCACAGATGG | FEQWAH |
| | ATGCCCTGTGTCGGTCGAGAAGATTGTGAA | SEDLQSLLLRVANAVSVKGIYKQMPG |
| | CATCTTCAATGGGACCAGCTGCCCCAGCCTG | CFNFLRKKLFFKTSASRA-(T2A) |
| | GGAGGGAAGCCCAAGCTCTTTTTCATCCAGG | |
| | CCTGTGGTGGGGAGCAGAAAGACCATGGGT | |
| | TTGAGGTGGCCTCCACTTCCCCTGAAGACGA | |
| | GTCCCCTGGCAGTAACCCCGAGCCAGATGCC | |
| | ACCCCGTTCCAGGAAGGTTTGAGGACCTTCG | |
| | ACCAGCTGGcCGCCATATCTAGTTTGCCCAC | |
| | ACCCAGTGACATCTTTGTGTCCTACTCTACTT | |
| | TCCCAGGTTTTGTTTCCTGGAGGGACCCCAA | |
| | GAGTGGCTCCTGGTACGTTGAGACCCTGGA | |
| | CGACATCTTTGAGCAGTGGGCTCACTCTGAA | |
| | GACCTGCAGTCCCTCCTGCTTAGGGTCGCTA | |
| | ATGCTGTTTCGGTGAAAGGGATTTATAAACA | |
| | GATGCCTGGTTGCTTTAATTTCCTCCGGAAA | |
| | AAACTTTTCTTTAAAACATCAGCTAGCAGAG | |
| | CC-(T2A) | |
| Fv-L-Caspase9 | SEQ ID NO: 90 | SEQ ID NO: 91 |
| D330N-T2A | (Fv-L)- | (Fv-L)- |
| | GTCGACGGATTTGGTGATGTCGGTGCTCTTG | VDGFGDVGALESLRGNADLAYILSME |
| | AGAGTTTGAGGGGAAATGCAGATTTGGCTT | PCGHCLIINNVNFCRESGLRTRTGSNI |
| | ACATCCTGAGCATGGAGCCCTGTGGCCACTG | DCEKLRRRFSS |
| | CCTCATTATCAACAATGTGAACTTCTGCCGT | LHFMVEVKGDLTAKKMVLALLELAR |
| | GAGTCCGGGCTCCGCACCCGCACTGGCTCCA | QDHGALDCCVVVILSHGCQASHLQF |
| | ACATCGACTGTGAGAAGTTGCGGCGTCGCTT | PGAVYGTDGC |
| | CTCCTCGCTGCATTTCATGGTGGAGGTGAAG | PVSVEKIVNIFNGTSCPSLGGKPKLFFI |
| | GGCGACCTGACTGCCAAGAAAATGGTGCTG | QACGGEQKDHGFEVASTSPEDESPG |
| | GCTTTGCTGGAGCTGGCGCGGCAGGACCAC | SNPEPDA |
| | GGTGCTCTGGACTGCTGCGTGGTGGTCATTC | TPFQEGLRTFDQLnAISSLPTPSDIFVS |
| | TCTCTCACGGCTGTCAGGCCAGCCACCTGCA | YSTFPGFVSWRDPKSGSWYVETLDDI |
| | GTTCCCAGGGGCTGTCTACGGCACAGATGG | FEQWAH |
| | ATGCCCTGTGTCGGTCGAGAAGATTGTGAA | |
| | CATCTTCAATGGGACCAGCTGCCCCAGCCTG | SEDLQSLLLRVANAVSVKGIYKQMPG |
| | GGAGGGAAGCCCAAGCTCTTTTTCATCCAGG | CFNFLRKKLFFKTSASRA-(T2A) |
| | CCTGTGGTGGGGAGCAGAAAGACCATGGGT | |
| | TTGAGGTGGCCTCCACTTCCCCTGAAGACGA | |
| | GTCCCCTGGCAGTAACCCCGAGCCAGATGCC | |
| | ACCCCGTTCCAGGAAGGTTTGAGGACCTTCG | |
| | ACCAGCTGGcCGCCATATCTAGTTTGCCCAC | |
| | ACCCAGTGACATCTTTGTGTCCTACTCTACTT | |
| | TCCCAGGTTTTGTTTCCTGGAGGGACCCCAA | |
| | GAGTGGCTCCTGGTACGTTGAGACCCTGGA | |
| | CGACATCTTTGAGCAGTGGGCTCACTCTGAA | |
| | GACCTGCAGTCCCTCCTGCTTAGGGTCGCTA | |
| | ATGCTGTTTCGGTGAAAGGGATTTATAAACA | |
| | GATGCCTGGTTGCTTTAATTTCCTCCGGAAA | |
| | AAACTTTTCTTTAAAACATCAGCTAGCAGAG | |
| | CC-(T2A) | |
| Fv-L-Caspase9 | SEQ ID NO: 92 | SEQ ID NO: 93 |
| D330V-T2A | (Fv-L)- | (Fv-L)- |
| | GTCGACGGATTTGGTGATGTCGGTGCTCTTG | VDGFGDVGALESLRGNADLAYILSME |
| | AGAGTTTGAGGGGAAATGCAGATTTGGCTT | PCGHCLIINNVNFCRESGLRTRTGSNI |
| | ACATCCTGAGCATGGAGCCCTGTGGCCACTG | DCEKLRRRFSS |
| | CCTCATTATCAACAATGTGAACTTCTGCCGT | LHFMVEVKGDLTAKKMVLALLELAR |
| | GAGTCCGGGCTCCGCACCCGCACTGGCTCCA | QDHGALDCCVVVILSHGCQASHLQF |
| | ACATCGACTGTGAGAAGTTGCGGCGTCGCTT | PGAVYGTDGC |
| | CTCCTCGCTGCATTTCATGGTGGAGGTGAAG | PVSVEKIVNIFNGTSCPSLGGKPKLFFI |
| | GGCGACCTGACTGCCAAGAAAATGGTGCTG | QACGGEQKDHGFEVASTSPEDESPG |
| | GCTTTGCTGGAGCTGGCGCGGCAGGACCAC | SNPEPDA |
| | GGTGCTCTGGACTGCTGCGTGGTGGTCATTC | TPFQEGLRTFDQLvAISSLPTPSDIFVS |
| | TCTCTCACGGCTGTCAGGCCAGCCACCTGCA | YSTFPGFVSWRDPKSGSWYVETLDDI |
| | GTTCCCAGGGGCTGTCTACGGCACAGATGG | FEQWAH |
| | ATGCCCTGTGTCGGTCGAGAAGATTGTGAA | SEDLQSLLLRVANAVSVKGIYKQMPG |
| | CATCTTCAATGGGACCAGCTGCCCCAGCCTG | CFNFLRKKLFFKTSASRA-(T2A) |
| | GGAGGGAAGCCCAAGCTCTTTTTCATCCAGG | |
| | CCTGTGGTGGGGAGCAGAAAGACCATGGGT | |
| | TTGAGGTGGCCTCCACTTCCCCTGAAGACGA | |
| | GTCCCCTGGCAGTAACCCCGAGCCAGATGCC | |
| | ACCCCGTTCCAGGAAGGTTTGAGGACCTTCG | |
| | ACCAGCTGGcCGCCATATCTAGTTTGCCCAC | |
| | ACCCAGTGACATCTTTGTGTCCTACTCTACTT | |
| | TCCCAGGTTTTGTTTCCTGGAGGGACCCCAA | |
| | GAGTGGCTCCTGGTACGTTGAGACCCTGGA | |
| | CGACATCTTTGAGCAGTGGGCTCACTCTGAA | |
| | GACCTGCAGTCCCTCCTGCTTAGGGTCGCTA | |
| | ATGCTGTTTCGGTGAAAGGGATTTATAAACA | |
| | GATGCCTGGTTGCTTTAATTTCCTCCGGAAA | |
| | AAACTTTTCTTTAAAACATCAGCTAGCAGAG | |
| | CC-(T2A) | |
| Fv-L-Caspase9 | SEQ ID NO: 94 | SEQ ID NO: 95 |
| D330G-T2A | (Fv-L)- | (Fv-L)- |
| | GTCGACGGATTTGGTGATGTCGGTGCTCTTG | VDGFGDVGALESLRGNADLAYILSME |
| | AGAGTTTGAGGGGAAATGCAGATTTGGCTT | PCGHCLIINNVNFCRESGLRTRTGSNI |
| | ACATCCTGAGCATGGAGCCCTGTGGCCACTG | DCEKLRRRFSS |
| | CCTCATTATCAACAATGTGAACTTCTGCCGT | LHFMVEVKGDLTAKKMVLALLELAR |
| | GAGTCCGGGCTCCGCACCCGCACTGGCTCCA | QDHGALDCCVVVILSHGCQASHLQF |
| | ACATCGACTGTGAGAAGTTGCGGCGTCGCTT | PGAVYGTDGC |
| | CTCCTCGCTGCATTTCATGGTGGAGGTGAAG | PVSVEKIVNIFNGTSCPSLGGKPKLFFI |
| | GGCGACCTGACTGCCAAGAAAATGGTGCTG | QACGGEQKDHGFEVASTSPEDESPG |
| | GCTTTGCTGGAGCTGGCGCGGCAGGACCAC | SNPEPDA |
| | GGTGCTCTGGACTGCTGCGTGGTGGTCATTC | TPFQEGLRTFDQLgAISSLPTPSDIFVS |
| | TCTCTCACGGCTGTCAGGCCAGCCACCTGCA | YSTFPGFVSWRDPKSGSWYVETLDDI |
| | GTTCCCAGGGGCTGTCTACGGCACAGATGG | FEQWAH |
| | ATGCCCTGTGTCGGTCGAGAAGATTGTGAA | SEDLQSLLLRVANAVSVKGIYKQMPG |
| | CATCTTCAATGGGACCAGCTGCCCCAGCCTG | CFNFLRKKLFFKTSASRA-(T2A) |
| | GGAGGGAAGCCCAAGCTCTTTTTCATCCAGG | |
| | CCTGTGGTGGGGAGCAGAAAGACCATGGGT | |
| | TTGAGGTGGCCTCCACTTCCCCTGAAGACGA | |
| | GTCCCCTGGCAGTAACCCCGAGCCAGATGCC | |
| | ACCCCGTTCCAGGAAGGTTTGAGGACCTTCG | |
| | ACCAGCTGGcCGCCATATCTAGTTTGCCCAC | |
| | ACCCAGTGACATCTTTGTGTCCTACTCTACTT | |
| | TCCCAGGTTTTGTTTCCTGGAGGGACCCCAA | |
| | GAGTGGCTCCTGGTACGTTGAGACCCTGGA | |
| | CGACATCTTTGAGCAGTGGGCTCACTCTGAA | |
| | GACCTGCAGTCCCTCCTGCTTAGGGTCGCTA | |
| | ATGCTGTTTCGGTGAAAGGGATTTATAAACA | |
| | GATGCCTGGTTGCTTTAATTTCCTCCGGAAA | |
| | AAACTTTTCTTTAAAACATCAGCTAGCAGAG | |
| | CC-(T2A) | |
| Fv-L-Caspase9 D330S- | SEQ ID NO: 96 | SEQ ID NO: 97 |
| T2A | (Fv-L)- | (Fv-L)- |
| | GTCGACGGATTTGGTGATGTCGGTGCTCTTG | VDGFGDVGALESLRGNADLAYILSME |
| | AGAGTTTGAGGGGAAATGCAGATTTGGCTT | PCGHCLIINNVNFCRESGLRTRTGSNI |
| | ACATCCTGAGCATGGAGCCCTGTGGCCACTG | DCEKLRRRFSS |
| | CCTCATTATCAACAATGTGAACTTCTGCCGT | LHFMVEVKGDLTAKKMVLALLELAR |
| | GAGTCCGGGCTCCGCACCCGCACTGGCTCCA | QDHGALDCCVVVILSHGCQASHLQF |
| | ACATCGACTGTGAGAAGTTGCGGCGTCGCTT | PGAVYGTDGC |
| | CTCCTCGCTGCATTTCATGGTGGAGGTGAAG | PVSVEKIVNIFNGTSCPSLGGKPKLFFI |
| | GGCGACCTGACTGCCAAGAAAATGGTGCTG | QACGGEQKDHGFEVASTSPEDESPG |
| | GCTTTGCTGGAGCTGGCGCGGCAGGACCAC | SNPEPDA |
| | GGTGCTCTGGACTGCTGCGTGGTGGTCATTC | TPFQEGLRTFDQLsAISSLPTPSDIFVS |
| | TCTCTCACGGCTGTCAGGCCAGCCACCTGCA | YSTFPGFVSWRDPKSGSWYVETLDDI |
| | GTTCCCAGGGGCTGTCTACGGCACAGATGG | FEQWAH |
| | ATGCCCTGTGTCGGTCGAGAAGATTGTGAA | |
| Fv-L-iCaspase9 | SEQ ID NO: 100 | SEQ ID NO: 101 |
| F404Y-T2A | (Fv-L)- | (Fv-L)- |
| | GTCGACGGATTTGGTGATGTCGGTGCTCTTG | VDGFGDVGALESLRGNADLAYILSME |
| | AGAGTTTGAGGGGAAATGCAGATTTGGCTT | PCGHCLIINNVNFCRESGLRTRTGSNI |
| | ACATCCTGAGCATGGAGCCCTGTGGCCACTG | DCEKLRRRFSS |
| | CCTCATTATCAACAATGTGAACTTCTGCCGT | LHFMVEVKGDLTAKKMVLALLELAR |
| | GAGTCCGGGCTCCGCACCCGCACTGGCTCCA | QDHGALDCCVVVILSHGCQASHLQF |
| | ACATCGACTGTGAGAAGTTGCGGCGTCGCTT | PGAVYGTDGC |
| | CTCCTCGCTGCATTTCATGGTGGAGGTGAAG | PVSVEKIVNIFNGTSCPSLGGKPKLFFI |
| | GGCGACCTGACTGCCAAGAAAATGGTGCTG | QACGGEQKDHGFEVASTSPEDESPG |
| | GCTTTGCTGGAGCTGGCGCGGCAGGACCAC | SNPEPDA |
| | GGTGCTCTGGACTGCTGCGTGGTGGTCATTC | TPFQEGLRTFDQLDAISSLPTPSDIFVS |
| | TCTCTCACGGCTGTCAGGCCAGCCACCTGCA | YSTFPGFVSWRDPKSGSWYVETLDDI |
| | GTTCCCAGGGGCTGTCTACGGCACAGATGG | FEQWAH |
| | ATGCCCTGTGTCGGTCGAGAAGATTGTGAA | SEDLQSLLLRVANAVSVKGIYKQMPG |
| | CATCTTCAATGGGACCAGCTGCCCCAGCCTG | CyNFLRKKLFFKTSASRA-(T2A) |
| | GGAGGGAAGCCCAAGCTCTTTTTCATCCAGG | |
| | CCTGTGGTGGGGAGCAGAAAGACCATGGGT | |
| | TTGAGGTGGCCTCCACTTCCCCTGAAGACGA | |
| | GTCCCCTGGCAGTAACCCCGAGCCAGATGCC | |
| | ACCCCGTTCCAGGAAGGTTTGAGGACCTTCG | |
| | ACCAGCTGGACGCCATATCTAGTTTGCCCAC | |
| | ACCCAGTGACATCTTTGTGTCCTACTCTACTT | |
| | TCCCAGGTTTTGTTTCCTGGAGGGACCCCAA | |
| | GAGTGGCTCCTGGTACGTTGAGACCCTGGA | |
| | CGACATCTTTGAGCAGTGGGCTCACTCTGAA | |
| | GACCTGCAGTCCCTCCTGCTTAGGGTCGCTA | |
| | ATGCTGTTTCGGTGAAAGGGATTTATAAACA | |
| | GATGCCTGGTTGCTaTAATTTCCTCCGGAAA | |
| | AAACTTTTCTTTAAAACATCAGCTAGCAGAG | |
| | CC-(T2A) | |
| Fv-L-iCASP9 F404W- | SEQ ID NO: 102 | SEQ ID NO: 103 |
| T2A | (Fv-L)- | (Fv-L)- |
| | GTCGACGGATTTGGTGATGTCGGTGCTCTTG | VDGFGDVGALESLRGNADLAYILSME |
| | AGAGTTTGAGGGGAAATGCAGATTTGGCTT | PCGHCLIINNVNFCRESGLRTRTGSNI |
| | ACATCCTGAGCATGGAGCCCTGTGGCCACTG | DCEKLRRRFSS |
| | CCTCATTATCAACAATGTGAACTTCTGCCGT | LHFMVEVKGDLTAKKMVLALLELAR |
| | GAGTCCGGGCTCCGCACCCGCACTGGCTCCA | QDHGALDCCVVVILSHGCQASHLQF |
| | ACATCGACTGTGAGAAGTTGCGGCGTCGCTT | PGAVYGTDGC |
| | CTCCTCGCTGCATTTCATGGTGGAGGTGAAG | PVSVEKIVNIFNGTSCPSLGGKPKLFFI |
| | GGCGACCTGACTGCCAAGAAAATGGTGCTG | QACGGEQKDHGFEVASTSPEDESPG |
| | GCTTTGCTGGAGCTGGCGCGGCAGGACCAC | SNPEPDA |
| | GGTGCTCTGGACTGCTGCGTGGTGGTCATTC | TPFQEGLRTFDQLDAISSLPTPSDIFVS |
| | TCTCTCACGGCTGTCAGGCCAGCCACCTGCA | YSTFPGFVSWRDPKSGSWYVETLDDI |
| | GTTCCCAGGGGCTGTCTACGGCACAGATGG | FEQWAH |
| | ATGCCCTGTGTCGGTCGAGAAGATTGTGAA | |
| | CATCTTCAATGGGACCAGCTGCCCCAGCCTG | SEDLQSLLLRVANAVSVKGIYKQMPG |
| | GGAGGGAAGCCCAAGCTCTTTTTCATCCAGG | CwNFLRKKLFFKTSASRA-(T2A) |
| | CCTGTGGTGGGGAGCAGAAAGACCATGGGT | |
| | TTGAGGTGGCCTCCACTTCCCCTGAAGACGA | |
| | GTCCCCTGGCAGTAACCCCGAGCCAGATGCC | |
| | ACCCCGTTCCAGGAAGGTTTGAGGACCTTCG | |
| | ACCAGCTGGACGCCATATCTAGTTTGCCCAC | |
| | ACCCAGTGACATCTTTGTGTCCTACTCTACTT | |
| | TCCCAGGTTTTGTTTCCTGGAGGGACCCCAA | |
| | GAGTGGCTCCTGGTACGTTGAGACCCTGGA | |
| | CGACATCTTTGAGCAGTGGGCTCACTCTGAA | |
| | GACCTGCAGTCCCTCCTGCTTAGGGTCGCTA | |
| | ATGCTGTTTCGGTGAAAGGGATTTATAAACA | |
| | GATGCCTGGTTGCTggAATTTCCTCCGGAAA | |
| | AAACTTTTCTTTAAAACATCAGCTAGCAGAG | |
| | CC-(T2A) | |
| Fv-L-iCaspase9 | SEQ ID NO: 104 | SEQ ID NO: 105 |
| N405Q-T2A | (Fv-L)- | (Fv-L)- |
| | GTCGACGGATTTGGTGATGTCGGTGCTCTTG | VDGFGDVGALESLRGNADLAYILSME |
| | AGAGTTTGAGGGGAAATGCAGATTTGGCTT | PCGHCLIINNVNFCRESGLRTRTGSNI |
| | ACATCCTGAGCATGGAGCCCTGTGGCCACTG | DCEKLRRRFSS |
| | CCTCATTATCAACAATGTGAACTTCTGCCGT | LHFMVEVKGDLTAKKMVLALLELAR |
| | GAGTCCGGGCTCCGCACCCGCACTGGCTCCA | QDHGALDCCVVVILSHGCQASHLQF |
| | ACATCGACTGTGAGAAGTTGCGGCGTCGCTT | PGAVYGTDGC |
| | CTCCTCGCTGCATTTCATGGTGGAGGTGAAG | PVSVEKIVNIFNGTSCPSLGGKPKLFFI |
| | GGCGACCTGACTGCCAAGAAAATGGTGCTG | QACGGEQKDHGFEVASTSPEDESPG |
| | GCTTTGCTGGAGCTGGCGCGGCAGGACCAC | SNPEPDA |
| | GGTGCTCTGGACTGCTGCGTGGTGGTCATTC | TPFQEGLRTFDQLDAISSLPTPSDIFVS |
| | TCTCTCACGGCTGTCAGGCCAGCCACCTGCA | YSTFPGFVSWRDPKSGSWYVETLDDI |
| | GTTCCCAGGGGCTGTCTACGGCACAGATGG | FEQWAH |
| | ATGCCCTGTGTCGGTCGAGAAGATTGTGAA | SEDLQSLLLRVANAVSVKGIYKQMPG |
| | CATCTTCAATGGGACCAGCTGCCCCAGCCTG | CFqFLRKKLFFKTSASRA-(T2A) |
| | GGAGGGAAGCCCAAGCTCTTTTTCATCCAGG | |
| | CCTGTGGTGGGGAGCAGAAAGACCATGGGT | |
| | TTGAGGTGGCCTCCACTTCCCCTGAAGACGA | |
| | GTCCCCTGGCAGTAACCCCGAGCCAGATGCC | |
| | ACCCCGTTCCAGGAAGGTTTGAGGACCTTCG | |
| | ACCAGCTGGACGCCATATCTAGTTTGCCCAC | |
| | ACCCAGTGACATCTTTGTGTCCTACTCTACTT | |
| | TCCCAGGTTTTGTTTCCTGGAGGGACCCCAA | |
| | GAGTGGCTCCTGGTACGTTGAGACCCTGGA | |
| | CGACATCTTTGAGCAGTGGGCTCACTCTGAA | |
| | GACCTGCAGTCCCTCCTGCTTAGGGTCGCTA | |
| | ATGCTGTTTCGGTGAAAGGGATTTATAAACA | |
| | GATGCCTGGTTGCTTTcagTTCCTCCGGAAAA | |
| | AACTTTTCTTTAAAACATCAGCTAGCAGAGC | |
| | C-(T2A) | |
| Fv-L-iCaspase9 | SEQ ID NO: 106 | SEQ ID NO: 107 |
| N405Q codon | -(Fv-L)- | (Fv-L)- |
| optimized-T2A | GTGGACGGGTTTGGAGATGTGGGAGCCCTG | VDGFGDVGALESLRGNADLAYILSME |
| | GAATCCCTGCGGGGCAATGCCGATCTGGCTT | PCGHCLIINNVNFCRESGLRTRTGSNI |
| | ACATCCTGTCTATGGAGCCTTGCGGCCACTG | DCEKLRRRFSS |
| | TCTGATCATTAACAATGTGAACTTCTGCAGA | LHFMVEVKGDLTAKKMVLALLELAR |
| | GAGAGCGGGCTGCGGACCAGAACAGGATC | QDHGALDCCVVVILSHGCQASHLQF |
| | CAATATTGACTGTGAAAAGCTGCGGAGAAG | PGAVYGTDGC |
| | GTTCTCTAGTCTGCACTTTATGGTCGAGGTG | PVSVEKIVNIFNGTSCPSLGGKPKLFFI |
| | AAAGGCGATCTGACCGCTAAGAAAATGGTG | QACGGEQKDHGFEVASTSPEDESPG |
| | CTGGCCCTGCTGGAACTGGCTCGGCAGGAC | SNPEPDA |
| | CATGGGGCACTGGATTGCTGCGTGGTCGTG | TPFQEGLRTFDQLDAISSLPTPSDIFVS |
| | ATCCTGAGTCACGGCTGCCAGGCTTCACATC | YSTFPGFVSWRDPKSGSWYVETLDDI |
| | TGCAGTTCCCTGGGGCAGTCTATGGAACTGA | FEQWAH |
| | CGGCTGTCCAGTCAGCGTGGAGAAGATCGT | SEDLQSLLLRVANAVSVKGIYKQMPG |
| | GAACATCTTCAACGGCACCTCTTGCCCAAGT | CFqFLRKKLFFKTSASRA-(T2A) |
| | CTGGGCGGGAAGCCCAAACTGTTCTTTATTC | |
| | AGGCCTGTGGAGGCGAGCAGAAAGATCAC | |
| | GGCTTCGAAGTGGCTAGCACCTCCCCCGAG | |
| | GACGAATCACCTGGAAGCAACCCTGAGCCA | |
| | GATGCAACCCCCTTCCAGGAAGGCCTGAGG | |
| | ACATTTGACCAGCTGGATGCCATCTCAAGCC | |
| | TGCCCACACCTTCTGACATTTTCGTCTCTTAC | |
| | AGTACTTTCCCTGGATTTGTGAGCTGGCGCG | |
| | ATCCAAAGTCAGGCAGCTGGTACGTGGAGA | |
| | CACTGGACGATATCTTTGAGCAGTGGGCCCA | |
| | TTCTGAAGACCTGCAGAGTCTGCTGCTGCGA | |
| | GTGGCCAATGCTGTCTCTGTGAAGGGGATCT | |
| | ACAAACAGATGCCAGGATGCTTCcagTTTCT | |
| | GAGAAAGAAACTGTTCTTTAAGACCTCCGCA | |
| | TCTAGGGCC-(T2A) | |
| Fv-iCASP9 F406L-T2A | SEQ ID NO: 108 | SEQ ID NO: 109 |
| | (Fv-L)- | (Fv-L)- |
| | GTCGACGGATTTGGTGATGTCGGTGCTCTTG | VDGFGDVGALESLRGNADLAYILSME |
| | AGAGTTTGAGGGGAAATGCAGATTTGGCTT | PCGHCLIINNVNFCRESGLRTRTGSNI |
| | ACATCCTGAGCATGGAGCCCTGTGGCCACTG | DCEKLRRRFSSLHFMVEVKGDLTAKK |
| | CCTCATTATCAACAATGTGAACTTCTGCCGT | MVLALLELARQDHGALDCCVVVILSH |
| | GAGTCCGGGCTCCGCACCCGCACTGGCTCCA | GCQASHLQFPGAVYGTDGCPVSVEKI |
| | ACATCGACTGTGAGAAGTTGCGGCGTCGCTT | VNIFNGTSCPSLGGKPKLFFIQACGGE |
| | CTCCTCGCTGCATTTCATGGTGGAGGTGAAG | QKDHGFEVASTSPEDESPGSNPEPDA |
| | GGCGACCTGACTGCCAAGAAAATGGTGCTG | TPFQEGLRTFDQLDAISSLPTPSDIFVS |
| | GCTTTGCTGGAGCTGGCGCGGCAGGACCAC | YSTFPGFVSWRDPKSGSWYVETLDDI |
| | GGTGCTCTGGACTGCTGCGTGGTGGTCATTC | FEQWAHSEDLQSLLLRVANAVSVKGI |
| | TCTCTCACGGCTGTCAGGCCAGCCACCTGCA | YKQMPGCFNLLRKKLFFKTSASRA- |
| | GTTCCCAGGGGCTGTCTACGGCACAGATGG | (T2A) |
| | ATGCCCTGTGTCGGTCGAGAAGATTGTGAA | |
| | CATCTTCAATGGGACCAGCTGCCCCAGCCTG | |
| | GGAGGGAAGCCCAAGCTCTTTTTCATCCAGG | |
| | CCTGTGGTGGGGAGCAGAAAGACCATGGGT | |
| | TTGAGGTGGCCTCCACTTCCCCTGAAGACGA | |
| | GTCCCCTGGCAGTAACCCCGAGCCAGATGCC | |
| | ACCCCGTTCCAGGAAGGTTTGAGGACCTTCG | |
| | ACCAGCTGGACGCCATATCTAGTTTGCCCAC | |
| | ACCCAGTGACATCTTTGTGTCCTACTCTACTT | |
| | TCCCAGGTTTTGTTTCCTGGAGGGACCCCAA | |
| | GAGTGGCTCCTGGTACGTTGAGACCCTGGA | |
| | CGACATCTTTGAGCAGTGGGCTCACTCTGAA | |
| | GACCTGCAGTCCCTCCTGCTTAGGGTCGCTA | |
| | ATGCTGTTTCGGTGAAAGGGATTTATAAACA | |
| | GATGCCTGGTTGCTTTAATcTCCTCCGGAAA | |
| | AAACTTTTCTTTAAAACATCAGCTAGCAGAG | |
| | CC-(T2A) | |
| Fv-iCASP9 F406T-T2A | SEQ ID NO: 110 | SEQ ID NO: 111 |
| | (Fv-L)- | (Fv-L)- |
| | GTCGACGGATTTGGTGATGTCGGTGCTCTTG | VDGFGDVGALESLRGNADLAYILSME |
| | AGAGTTTGAGGGGAAATGCAGATTTGGCTT | PCGHCLIINNVNFCRESGLRTRTGSNI |
| | ACATCCTGAGCATGGAGCCCTGTGGCCACTG | DCEKLRRRFSSLHFMVEVKGDLTAKK |
| | CCTCATTATCAACAATGTGAACTTCTGCCGT | MVLALLELARQDHGALDCCVVVILSH |
| | GAGTCCGGGCTCCGCACCCGCACTGGCTCCA | GCQASHLQFPGAVYGTDGCPVSVEKI |
| | ACATCGACTGTGAGAAGTTGCGGCGTCGCTT | VNIFNGTSCPSLGGKPKLFFIQACGGE |
| | CTCCTCGCTGCATTTCATGGTGGAGGTGAAG | QKDHGFEVASTSPEDESPGSNPEPDA |
| | GGCGACCTGACTGCCAAGAAAATGGTGCTG | TPFQEGLRTFDQLDAISSLPTPSDIFVS |
| | GCTTTGCTGGAGCTGGCGCGGCAGGACCAC | YSTFPGFVSWRDPKSGSWYVETLDDI |
| | GGTGCTCTGGACTGCTGCGTGGTGGTCATTC | FEQWAHSEDLQSLLLRVANAVSVKGI |
| | TCTCTCACGGCTGTCAGGCCAGCCACCTGCA | YKQMPGCFNtLRKKLFFKTSASRA- |
| | GTTCCCAGGGGCTGTCTACGGCACAGATGG | (T2A) |
| | ATGCCCTGTGTCGGTCGAGAAGATTGTGAA | |
| | CATCTTCAATGGGACCAGCTGCCCCAGCCTG | |
| | GGAGGGAAGCCCAAGCTCTTTTTCATCCAGG | |
| | CCTGTGGTGGGGAGCAGAAAGACCATGGGT | |
| | TTGAGGTGGCCTCCACTTCCCCTGAAGACGA | |
| | GTCCCCTGGCAGTAACCCCGAGCCAGATGCC | |
| | ACCCCGTTCCAGGAAGGTTTGAGGACCTTCG | |
| | ACCAGCTGGACGCCATATCTAGTTTGCCCAC | |
| | ACCCAGTGACATCTTTGTGTCCTACTCTACTT | |
| | TCCCAGGTTTTGTTTCCTGGAGGGACCCCAA | |
| | GAGTGGCTCCTGGTACGTTGAGACCCTGGA | |
| | CGACATCTTTGAGCAGTGGGCTCACTCTGAA | |
| | GACCTGCAGTCCCTCCTGCTTAGGGTCGCTA | |
| | ATGCTGTTTCGGTGAAAGGGATTTATAAACA | |
| | GATGCCTGGTTGCTTTAAttcCCTCCGGAAAA | |
| | AACTTTTCTTTAAAACATCAGCTAGCAGAGC | |
| | C-(T2A) | |
| Fv-L-iCaspase9 S144A | SEQ ID NO: 112 | SEQ ID NO: 113 |
| N405Q-T2A codon | (Fv-L)- | (Fv-L)- |
| optimized | GTGGACGGGTTTGGAGATGTGGGAGCCCTG | VDGFGDVGALEaLRGNADLAYILSME |
| | GAAgCCCTGCGGGGCAATGCCGATCTGGCTT | PCGHCLIINNVNFCRESGLRTRTGSNI |
| | ACATCCTGTCTATGGAGCCTTGCGGCCACTG | DCEKLRRRFSS |
| | TCTGATCATTAACAATGTGAACTTCTGCAGA | LHFMVEVKGDLTAKKMVLALLELAR |
| | GAGAGCGGGCTGCGGACCAGAACAGGATC | QDHGALDCCVVVILSHGCQASHLQF |
| | CAATATTGACTGTGAAAAGCTGCGGAGAAG | PGAVYGTDGC |
| | GTTCTCTAGTCTGCACTTTATGGTCGAGGTG | PVSVEKIVNIFNGTSCPSLGGKPKLFFI |
| | AAAGGCGATCTGACCGCTAAGAAAATGGTG | QACGGEQKDHGFEVASTSPEDESPG |
| | CTGGCCCTGCTGGAACTGGCTCGGCAGGAC | SNPEPDA |
| | CATGGGGCACTGGATTGCTGCGTGGTCGTG | TPFQEGLRTFDQLDAISSLPTPSDIFVS |
| | ATCCTGAGTCACGGCTGCCAGGCTTCACATC | YSTFPGFVSWRDPKSGSWYVETLDDI |
| | TGCAGTTCCCTGGGGCAGTCTATGGAACTGA | FEQWAH |
| | CGGCTGTCCAGTCAGCGTGGAGAAGATCGT | SEDLQSLLLRVANAVSVKGIYKQMPG |
| | GAACATCTTCAACGGCACCTCTTGCCCAAGT | CFqFLRKKLFFKTSASRA-(T2A) |
| | CTGGGCGGGAAGCCCAAACTGTTCTTTATTC | |
| | AGGCCTGTGGAGGCGAGCAGAAAGATCAC | |
| | GGCTTCGAAGTGGCTAGCACCTCCCCCGAG | |
| | GACGAATCACCTGGAAGCAACCCTGAGCCA | |
| | GATGCAACCCCCTTCCAGGAAGGCCTGAGG | |
| | ACATTTGACCAGCTGGATGCCATCTCAAGCC | |
| | TGCCCACACCTTCTGACATTTTCGTCTCTTAC | |
| | AGTACTTTCCCTGGATTTGTGAGCTGGCGCG | |
| | ATCCAAAGTCAGGCAGCTGGTACGTGGAGA | |
| | CACTGGACGATATCTTTGAGCAGTGGGCCCA | |
| | TTCTGAAGACCTGCAGAGTCTGCTGCTGCGA | |
| | GTGGCCAATGCTGTCTCTGTGAAGGGGATCT | |
| | ACAAACAGATGCCAGGATGCTTCcagTTTCT | |
| | GAGAAAGAAACTGTTCTTTAAGACCTCCGCA | |
| | TCTAGGGCC-(T2A) | |
| Fv-iCASP9 S144A | SEQ ID NO: 114 | SEQ ID NO: 115 |
| D330A-T2A | (Fv-L)- | (Fv-L)- |
| | GTCGACGGATTTGGTGATGTCGGTGCTCTTG | VDGFGDVGALEaLRGNADLAYILSME |
| | AGgcTTTGAGGGGAAATGCAGATTTGGCTTA | PCGHCLIINNVNFCRESGLRTRTGSNI |
| | CATCCTGAGCATGGAGCCCTGTGGCCACTGC | DCEKLRRRFSSLHFMVEVKGDLTAKK |
| | CTCATTATCAACAATGTGAACTTCTGCCGTG | MVLALLELARQDHGALDCCVVVILSH |
| | AGTCCGGGCTCCGCACCCGCACTGGCTCCAA | GCQASHLQFPGAVYGTDGCPVSVEKI |
| | CATCGACTGTGAGAAGTTGCGGCGTCGCTTC | VNIFNGTSCPSLGGKPKLFFIQACGGE |
| | TCCTCGCTGCATTTCATGGTGGAGGTGAAGG | QKDHGFEVASTSPEDESPGSNPEPDA |
| | GCGACCTGACTGCCAAGAAAATGGTGCTGG | TPFQEGLRTFDQLaAISSLPTPSDIFVS |
| | CTTTGCTGGAGCTGGCGCGGCAGGACCACG | YSTFPGFVSWRDPKSGSWYVETLDDI |
| | GTGCTCTGGACTGCTGCGTGGTGGTCATTCT | FEQWAHSEDLQSLLLRVANAVSVKGI |
| | CTCTCACGGCTGTCAGGCCAGCCACCTGCAG | YKQMPGCFNFLRKKLFFKTSASRA |
| | TTCCCAGGGGCTGTCTACGGCACAGATGGA | |
| | TGCCCTGTGTCGGTCGAGAAGATTGTGAAC | |
| | ATCTTCAATGGGACCAGCTGCCCCAGCCTGG | |
| | GAGGGAAGCCCAAGCTCTTTTTCATCCAGGC | |
| | CTGTGGTGGGGAGCAGAAAGACCATGGGTT | |
| | TGAGGTGGCCTCCACTTCCCCTGAAGACGAG | |
| | TCCCCTGGCAGTAACCCCGAGCCAGATGCCA | |
| | CCCCGTTCCAGGAAGGTTTGAGGACCTTCGA | |
| | CCAGCTGGcCGCCATATCTAGTTTGCCCACA | |
| | CCCAGTGACATCTTTGTGTCCTACTCTACTTT | |
| | CCCAGGTTTTGTTTCCTGGAGGGACCCCAAG | |
| | AGTGGCTCCTGGTACGTTGAGACCCTGGAC | |
| | GACATCTTTGAGCAGTGGGCTCACTCTGAAG | |
| | ACCTGCAGTCCCTCCTGCTTAGGGTCGCTAA | |
| | TGCTGTTTCGGTGAAAGGGATTTATAAACAG | |
| | ATGCCTGGTTGCTTTAATTTCCTCCGGAAAA | |
| | AACTTTTCTTTAAAACATCAGCTAGCAGAGC | |
| | C-(T2A) | |
| Fv-iCASP9 S144D | SEQ ID NO: 116 | SEQ ID NO: 117 |
| D330A-T2A | (Fv-L)- | (Fv-L)- |
| | GTCGACGGATTTGGTGATGTCGGTGCTCTTG | VDGFGDVGALEdLRGNADLAYILSME |
| | AGgacTTGAGGGGAAATGCAGATTTGGCTTA | PCGHCLIINNVNFCRESGLRTRTGSNI |
| | CATCCTGAGCATGGAGCCCTGTGGCCACTGC | DCEKLRRRFSSLHFMVEVKGDLTAKK |
| | CTCATTATCAACAATGTGAACTTCTGCCGTG | MVLALLELARQDHGALDCCVVVILSH |
| | AGTCCGGGCTCCGCACCCGCACTGGCTCCAA | GCQASHLQFPGAVYGTDGCPVSVEKI |
| | CATCGACTGTGAGAAGTTGCGGCGTCGCTTC | VNIFNGTSCPSLGGKPKLFFIQACGGE |
| | TCCTCGCTGCATTTCATGGTGGAGGTGAAGG | QKDHGFEVASTSPEDESPGSNPEPDA |
| | GCGACCTGACTGCCAAGAAAATGGTGCTGG | TPFQEGLRTFDQLaAISSLPTPSDIFVS |
| | CTTTGCTGGAGCTGGCGCGGCAGGACCACG | YSTFPGFVSWRDPKSGSWYVETLDDI |
| | GTGCTCTGGACTGCTGCGTGGTGGTCATTCT | FEQWAHSEDLQSLLLRVANAVSVKGI |
| | CTCTCACGGCTGTCAGGCCAGCCACCTGCAG | YKQMPGCFNFLRKKLFFKTSASRA |
| | TTCCCAGGGGCTGTCTACGGCACAGATGGA | |
| | TGCCCTGTGTCGGTCGAGAAGATTGTGAAC | |
| | ATCTTCAATGGGACCAGCTGCCCCAGCCTGG | |
| | GAGGGAAGCCCAAGCTCTTTTTCATCCAGGC | |
| | CTGTGGTGGGGAGCAGAAAGACCATGGGTT | |
| | TGAGGTGGCCTCCACTTCCCCTGAAGACGAG | |
| | TCCCCTGGCAGTAACCCCGAGCCAGATGCCA | |
| | CCCCGTTCCAGGAAGGTTTGAGGACCTTCGA | |
| | CCAGCTGGcCGCCATATCTAGTTTGCCCACA | |
| | CCCAGTGACATCTTTGTGTCCTACTCTACTTT | |
| | CCCAGGTTTTGTTTCCTGGAGGGACCCCAAG | |
| | AGTGGCTCCTGGTACGTTGAGACCCTGGAC | |
| | GACATCTTTGAGCAGTGGGCTCACTCTGAAG | |
| | ACCTGCAGTCCCTCCTGCTTAGGGTCGCTAA | |
| | TGCTGTTTCGGTGAAAGGGATTTATAAACAG | |
| | ATGCCTGGTTGCTTTAATTTCCTCCGGAAAA | |
| | AACTTTTCTTTAAAACATCAGCTAGCAGAGC | |
| | C-(T2A) | |
| Fv-iCASP9 S196A | SEQ ID NO: 118 | SEQ ID NO: 119 |
| D330A-T2A | (Fv-L)- | (Fv-L)- |
| | GTCGACGGATTTGGTGATGTCGGTGCTCTTG | VDGFGDVGALESLRGNADLAYILSME |
| | AGAGTTTGAGGGGAAATGCAGATTTGGCTT | PCGHCLIINNVNFCRESGLRTRTGSNI |
| | ACATCCTGAGCATGGAGCCCTGTGGCCACTG | DCEKLRRRFSaLHFMVEVKGDLTAKK |
| | CCTCATTATCAACAATGTGAACTTCTGCCGT | MVLALLELARQDHGALDCCVVVILSH |
| | GAGTCCGGGCTCCGCACCCGCACTGGCTCCA | GCQASHLQFPGAVYGTDGCPVSVEKI |
| | ACATCGACTGTGAGAAGTTGCGGCGTCGCTT | VNIFNGTSCPSLGGKPKLFFIQACGGE |
| | CTCCgCGCTGCATTTCATGGTGGAGGTGAAG | QKDHGFEVASTSPEDESPGSNPEPDA |
| | GGCGACCTGACTGCCAAGAAAATGGTGCTG | TPFQEGLRTFDQLaAISSLPTPSDIFVS |
| | GCTTTGCTGGAGCTGGCGCGGCAGGACCAC | YSTFPGFVSWRDPKSGSWYVETLDDI |
| | GGTGCTCTGGACTGCTGCGTGGTGGTCATTC | FEQWAHSEDLQSLLLRVANAVSVKGI |
| | TCTCTCACGGCTGTCAGGCCAGCCACCTGCA | YKQMPGCFNFLRKKLFFKTSASRA- |
| | GTTCCCAGGGGCTGTCTACGGCACAGATGG | (T2A) |
| | ATGCCCTGTGTCGGTCGAGAAGATTGTGAA | |
| | CATCTTCAATGGGACCAGCTGCCCCAGCCTG | |
| | GGAGGGAAGCCCAAGCTCTTTTTCATCCAGG | |
| | CCTGTGGTGGGGAGCAGAAAGACCATGGGT | |
| | TTGAGGTGGCCTCCACTTCCCCTGAAGACGA | |
| | GTCCCCTGGCAGTAACCCCGAGCCAGATGCC | |
| | ACCCCGTTCCAGGAAGGTTTGAGGACCTTCG | |
| | ACCAGCTGGcCGCCATATCTAGTTTGCCCAC | |
| | ACCCAGTGACATCTTTGTGTCCTACTCTACTT | |
| | TCCCAGGTTTTGTTTCCTGGAGGGACCCCAA | |
| | GAGTGGCTCCTGGTACGTTGAGACCCTGGA | |
| | CGACATCTTTGAGCAGTGGGCTCACTCTGAA | |
| | GACCTGCAGTCCCTCCTGCTTAGGGTCGCTA | |
| | ATGCTGTTTCGGTGAAAGGGATTTATAAACA | |
| | GATGCCTGGTTGCTTTAATTTCCTCCGGAAA | |
| | AAACTTTTCTTTAAAACATCAGCTAGCAGAG | |
| | CC-(T2A) | |
| Fv-iCASP9 S196D | SEQ ID NO: 120 | SEQ ID NO: 121 |
| D330A-T2A | (Fv-L)- | (Fv-L)- |
| | GTCGACGGATTTGGTGATGTCGGTGCTCTTG | VDGFGDVGALESLRGNADLAYILSME |
| | AGAGTTTGAGGGGAAATGCAGATTTGGCTT | PCGHCLIINNVNFCRESGLRTRTGSNI |
| | ACATCCTGAGCATGGAGCCCTGTGGCCACTG | DCEKLRRRFSdLHFMVEVKGDLTAKK |
| | CCTCATTATCAACAATGTGAACTTCTGCCGT | MVLALLELARQDHGALDCCVVVILSH |
| | GAGTCCGGGCTCCGCACCCGCACTGGCTCCA | GCQASHLQFPGAVYGTDGCPVSVEKI |
| | ACATCGACTGTGAGAAGTTGCGGCGTCGCTT | VNIFNGTSCPSLGGKPKLFFIQACGGE |
| | CTCCgacCTGCATTTCATGGTGGAGGTGAAG | QKDHGFEVASTSPEDESPGSNPEPDA |
| | GGCGACCTGACTGCCAAGAAAATGGTGCTG | TPFQEGLRTFDQLaAISSLPTPSDIFVS |
| | GCTTTGCTGGAGCTGGCGCGGCAGGACCAC | YSTFPGFVSWRDPKSGSWYVETLDDI |
| | GGTGCTCTGGACTGCTGCGTGGTGGTCATTC | FEQWAHSEDLQSLLLRVANAVSVKGI |
| | TCTCTCACGGCTGTCAGGCCAGCCACCTGCA | YKQMPGCFNFLRKKLFFKTSASRA- |
| | GTTCCCAGGGGCTGTCTACGGCACAGATGG | (T2A) |
| | ATGCCCTGTGTCGGTCGAGAAGATTGTGAA | |
| | CATCTTCAATGGGACCAGCTGCCCCAGCCTG | |
| | GGAGGGAAGCCCAAGCTCTTTTTCATCCAGG | |
| | CCTGTGGTGGGGAGCAGAAAGACCATGGGT | |
| | TTGAGGTGGCCTCCACTTCCCCTGAAGACGA | |
| | GTCCCCTGGCAGTAACCCCGAGCCAGATGCC | |
| | ACCCCGTTCCAGGAAGGTTTGAGGACCTTCG | |
| | ACCAGCTGGcCGCCATATCTAGTTTGCCCAC | |
| | ACCCAGTGACATCTTTGTGTCCTACTCTACTT | |
| | TCCCAGGTTTTGTTTCCTGGAGGGACCCCAA | |
| | GAGTGGCTCCTGGTACGTTGAGACCCTGGA | |
| | CGACATCTTTGAGCAGTGGGCTCACTCTGAA | |
| | GACCTGCAGTCCCTCCTGCTTAGGGTCGCTA | |
| | ATGCTGTTTCGGTGAAAGGGATTTATAAACA | |
| | GATGCCTGGTTGCTTTAATTTCCTCCGGAAA | |
| | AAACTTTTCTTTAAAACATCAGCTAGCAGAG | |
| | CC-(T2A) | |
| Fv-L-iCaspase9 T317S | SEQ ID NO: 122 | SEQ ID NO: 123 |
| N405Q-T2A codon | (Fv-L)- | (Fv-L)- |
| optimized | GTGGACGGGTTTGGAGATGTGGGAGCCCTG | VDGFGDVGALESLRGNADLAYILSME |
| | GAATCCCTGCGGGGCAATGCCGATCTGGCTT | PCGHCLIINNVNFCRESGLRTRTGSNI |
| | ACATCCTGTCTATGGAGCCTTGCGGCCACTG | DCEKLRRRFSS |
| | TCTGATCATTAACAATGTGAACTTCTGCAGA | LHFMVEVKGDLTAKKMVLALLELAR |
| | GAGAGCGGGCTGCGGACCAGAACAGGATC | QDHGALDCCVVVILSHGCQASHLQF |
| | CAATATTGACTGTGAAAAGCTGCGGAGAAG | PGAVYGTDGC |
| | GTTCTCTAGTCTGCACTTTATGGTCGAGGTG | PVSVEKIVNIFNGTSCPSLGGKPKLFFI |
| | AAAGGCGATCTGACCGCTAAGAAAATGGTG | QACGGEQKDHGFEVASTSPEDESPG |
| | CTGGCCCTGCTGGAACTGGCTCGGCAGGAC | SNPEPDA |
| | CATGGGGCACTGGATTGCTGCGTGGTCGTG | sPFQEGLRTFDQLDAISSLPTPSDIFVS |
| | ATCCTGAGTCACGGCTGCCAGGCTTCACATC | YSTFPGFVSWRDPKSGSWYVETLDDI |
| | TGCAGTTCCCTGGGGCAGTCTATGGAACTGA | FEQWAH |
| | CGGCTGTCCAGTCAGCGTGGAGAAGATCGT | SEDLQSLLLRVANAVSVKGIYKQMPG |
| | GAACATCTTCAACGGCACCTCTTGCCCAAGT | CFqFLRKKLFFKTSASRA-(T2A) |
| | CTGGGCGGGAAGCCCAAACTGTTCTTTATTC | |
| | AGGCCTGTGGAGGCGAGCAGAAAGATCAC | |
| | GGCTTCGAAGTGGCTAGCACCTCCCCCGAG | |
| | GACGAATCACCTGGAAGCAACCCTGAGCCA | |
| | GATGCAAgCCCCTTCCAGGAAGGCCTGAGG | |
| | ACATTTGACCAGCTGGATGCCATCTCAAGCC | |
| | TGCCCACACCTTCTGACATTTTCGTCTCTTAC | |
| | AGTACTTTCCCTGGATTTGTGAGCTGGCGCG | |
| | ATCCAAAGTCAGGCAGCTGGTACGTGGAGA | |
| | CACTGGACGATATCTTTGAGCAGTGGGCCCA | |
| | TTCTGAAGACCTGCAGAGTCTGCTGCTGCGA | |
| | GTGGCCAATGCTGTCTCTGTGAAGGGGATCT | |
| | ACAAACAGATGCCAGGATGCTTCcagTTTCT | |
| | GAGAAAGAAACTGTTCTTTAAGACCTCCGCA | |
| | TCTAGGGCC-(T2A) | |
| Fv-L-Caspase9 D330A | SEQ ID NO: 124 | SEQ ID NO: 125 |
| N405Q-T2A | (Fv-L)- | (Fv-L)- |
| | GTCGACGGATTTGGTGATGTCGGTGCTCTTG | VDGFGDVGALESLRGNADLAYILSME |
| | AGAGTTTGAGGGGAAATGCAGATTTGGCTT | PCGHCLIINNVNFCRESGLRTRTGSNI |
| | ACATCCTGAGCATGGAGCCCTGTGGCCACTG | DCEKLRRRFSS |
| | CCTCATTATCAACAATGTGAACTTCTGCCGT | LHFMVEVKGDLTAKKMVLALLELAR |
| | GAGTCCGGGCTCCGCACCCGCACTGGCTCCA | QDHGALDCCVVVILSHGCQASHLQF |
| | ACATCGACTGTGAGAAGTTGCGGCGTCGCTT | PGAVYGTDGC |
| | CTCCTCGCTGCATTTCATGGTGGAGGTGAAG | PVSVEKIVNIFNGTSCPSLGGKPKLFFI |
| | GGCGACCTGACTGCCAAGAAAATGGTGCTG | QACGGEQKDHGFEVASTSPEDESPG |
| | GCTTTGCTGGAGCTGGCGCGGCAGGACCAC | SNPEPDA |
| | GGTGCTCTGGACTGCTGCGTGGTGGTCATTC | TPFQEGLRTFDQLaAISSLPTPSDIFVS |
| | TCTCTCACGGCTGTCAGGCCAGCCACCTGCA | YSTFPGFVSWRDPKSGSWYVETLDDI |
| | GTTCCCAGGGGCTGTCTACGGCACAGATGG | FEQWAH |
| | ATGCCCTGTGTCGGTCGAGAAGATTGTGAA | SEDLQSLLLRVANAVSVKGIYKQMPG |
| | CATCTTCAATGGGACCAGCTGCCCCAGCCTG | CFqFLRKKLFFKTSASRA-(T2A) |
| | GGAGGGAAGCCCAAGCTCTTTTTCATCCAGG | |
| | CCTGTGGTGGGGAGCAGAAAGACCATGGGT | |
| | TTGAGGTGGCCTCCACTTCCCCTGAAGACGA | |
| | GTCCCCTGGCAGTAACCCCGAGCCAGATGCC | |
| | ACCCCGTTCCAGGAAGGTTTGAGGACCTTCG | |
| | ACCAGCTGGcCGCCATATCTAGTTTGCCCAC | |
| | ACCCAGTGACATCTTTGTGTCCTACTCTACTT | |
| | TCCCAGGTTTTGTTTCCTGGAGGGACCCCAA | |
| | GAGTGGCTCCTGGTACGTTGAGACCCTGGA | |
| | CGACATCTTTGAGCAGTGGGCTCACTCTGAA | |
| | GACCTGCAGTCCCTCCTGCTTAGGGTCGCTA | |
| | ATGCTGTTTCGGTGAAAGGGATTTATAAACA | |
| | GATGCCTGGTTGCTTcagTTTCCTCCGGAAAA | |
| | AACTTTTCTTTAAAACATCAGCTAGCAGAGC | |
| | C-(T2A) | |
| Fv-iCASP9 | SEQ ID NO: 126 | SEQ ID NO: 127 |
| ATPF316AVPI-T2A | (Fv-L)- | (Fv-L)- |
| | GTCGACGGATTTGGTGATGTCGGTGCTCTTG | VDGFGDVGALESLRGNADLAYILSME |
| | AGAGTTTGAGGGGAAATGCAGATTTGGCTT | PCGHCLIINNVNFCRESGLRTRTGSNI |
| | ACATCCTGAGCATGGAGCCCTGTGGCCACTG | DCEKLRRRFSSLHFMVEVKGDLTAKK |
| | CCTCATTATCAACAATGTGAACTTCTGCCGT | MVLALLELARQDHGALDCCVVVILSH |
| | GAGTCCGGGCTCCGCACCCGCACTGGCTCCA | GCQASHLQFPGAVYGTDGCPVSVEKI |
| | ACATCGACTGTGAGAAGTTGCGGCGTCGCTT | VNIFNGTSCPSLGGKPKLFFIQACGGE |
| | CTCCTCGCTGCATTTCATGGTGGAGGTGAAG | QKDHGFEVASTSPEDESPGSNPEPDA |
| | GGCGACCTGACTGCCAAGAAAATGGTGCTG | vPiQEGLRTFDQLDAISSLPTPSDIFVS |
| | GCTTTGCTGGAGCTGGCGCGGCAGGACCAC | YSTFPGFVSWRDPKSGSWYVETLDDI |
| | GGTGCTCTGGACTGCTGCGTGGTGGTCATTC | FEQWAHSEDLQSLLLRVANAVSVKGI |
| | TCTCTCACGGCTGTCAGGCCAGCCACCTGCA | YKQMPGCFNFLRKKLFFKTSASRA- |
| | GTTCCCAGGGGCTGTCTACGGCACAGATGG | (T2A) |
| | ATGCCCTGTGTCGGTCGAGAAGATTGTGAA | |
| | CATCTTCAATGGGACCAGCTGCCCCAGCCTG | |
| | GGAGGGAAGCCCAAGCTCTTTTTCATCCAGG | |
| | CCTGTGGTGGGGAGCAGAAAGACCATGGGT | |
| | TTGAGGTGGCCTCCACTTCCCCTGAAGACGA | |
| | GTCCCCTGGCAGTAACCCCGAGCCAGATGCC | |
| | gtgCCcaTCCAGGAAGGTTTGAGGACCTTCGA | |
| | CCAGCTGGACGCCATATCTAGTTTGCCCACA | |
| | CCCAGTGACATCTTTGTGTCCTACTCTACTTT | |
| | CCCAGGTTTTGTTTCCTGGAGGGACCCCAAG | |
| | AGTGGCTCCTGGTACGTTGAGACCCTGGAC | |
| | GACATCTTTGAGCAGTGGGCTCACTCTGAAG | |
| | ACCTGCAGTCCCTCCTGCTTAGGGTCGCTAA | |
| | TGCTGTTTCGGTGAAAGGGATTTATAAACAG | |
| | ATGCCTGGTTGCTTTAATTTCCTCCGGAAAA | |
| | AACTTTTCTTTAAAACATCAGCTAGCAGAGC | |
| | C-(T2A) | |
| Fv-iCASP9 isaqt-T2A | SEQ ID NO: 128 | SEQ ID NO: 129 |
| | (Fv-L)- | (Fv-L)- |
| | GTCGACGGATTTGGTGATGTCGGTGCTCTTG | VDGFGDVGALESLRGNADLAYILSME |
| | AGAGTTTGAGGGGAAATGCAGATTTGGCTT | PCGHCLIINNVNFCRESGLRTRTGSNI |
| | ACATCCTGAGCATGGAGCCCTGTGGCCACTG | DCEKLRRRFSS |
| | CCTCATTATCAACAATGTGAACTTCTGCCGT | LHFMVEVKGDLTAKKMVLALLELAR |
| | GAGTCCGGGCTCCGCACCCGCACTGGCTCCA | QDHGALDCCVVVILSHGCQASHLQF |
| | ACATCGACTGTGAGAAGTTGCGGCGTCGCTT | PGAVYGTDGC |
| | CTCCTCGCTGCATTTCATGGTGGAGGTGAAG | PVSVEKIVNIFNGTSCPSLGGKPKLFFI |
| | GGCGACCTGACTGCCAAGAAAATGGTGCTG | QACGGEQKDHGFEVASTSPEDESPG |
| | GCTTTGCTGGAGCTGGCGCGGCAGGACCAC | SNPEPDA |
| | GGTGCTCTGGACTGCTGCGTGGTGGTCATTC | TPFQEGLRTFDQLDAISSLPTPSDIFVS |
| | TCTCTCACGGCTGTCAGGCCAGCCACCTGCA | YSTFPGFVSWRDPKSGSWYVETLDDI |
| | GTTCCCAGGGGCTGTCTACGGCACAGATGG | FEQWAH |
| | ATGCCCTGTGTCGGTCGAGAAGATTGTGAA | SEDLQSLLLRVANAVSVKGIYKQMPis |
| | CATCTTCAATGGGACCAGCTGCCCCAGCCTG | aqtLRKKLFFKTSASRA-(T2A) |
| | GGAGGGAAGCCCAAGCTCTTTTTCATCCAGG | |
| | CCTGTGGTGGGGAGCAGAAAGACCATGGGT | |
| | TTGAGGTGGCCTCCACTTCCCCTGAAGACGA | |
| | GTCCCCTGGCAGTAACCCCGAGCCAGATGCC | |
| | ACCCCGTTCCAGGAAGGTTTGAGGACCTTCG | |
| | ACCAGCTGGACGCCATATCTAGTTTGCCCAC | |
| | ACCCAGTGACATCTTTGTGTCCTACTCTACTT | |
| | TCCCAGGTTTTGTTTCCTGGAGGGACCCCAA | |
| | GAGTGGCTCCTGGTACGTTGAGACCCTGGA | |
| | CGACATCTTTGAGCAGTGGGCTCACTCTGAA | |
| | GACCTGCAGTCCCTCCTGCTTAGGGTCGCTA | |
| | ATGCTGTTTCGGTGAAAGGGATTTATAAACA | |
| | GATGCCgatatccgcacagacaCTCCGGAAAAAA | |
| | CTTTTCTTTAAAACATCAGCTAGCAGAGCC- | |
| | (T2A) | |

[0691] Partial sequence of a plasmid insert coding for a polypeptide that encodes an inducible Caspase-9 polypeptide and a chimeric antigen receptor that binds to CD19, separated by a 2A linker, wherein the two Caspase-9 polypeptide and the chimeric antigen receptor are separated during translation. The example of a chimeric antigen receptor provided herein may be further modified by including costimulatory polypeptides such as, for example, but not limited to, CD28, 4-1BB and OX40. The inducible Caspase-9 polypeptide provided herein may be substituted by an inducible modified Caspase-9 polypeptide, such as, for example, those provided herein.

SEQ ID NO: 130 FKBPv36
ATGCTGGAGGGAGTGCAGGTGGAGACTATTAGCCCCGGAGATGGCAGAACATTCCCCAAAA
GAGGACAGACTTGCGTCGTGCATTATACTGGAATGCTGGAAGACGGCAAGAAGGTGGACAG
CAGCCGGGACCGAAACAAGCCCTTCAAGTTCATGCTGGGGAAGCAGGAAGTGATCCGGGGC
TGGGAGGAAGGAGTCGCACAGATGTCAGTGGGACAGAGGGCCAAACTGACTATTAGCCCAG
ACTACGCTTATGGAGCAACCGGCCACCCCGGGATCATTCCCCCTCATGCTACACTGGTCTTC
GATGTGGAGCTGCTGAAGCTGGAA
SEQ ID NO: 131 FKBPv36
MLEGVQVETISPGDGRTFPKRGQTCVVHYTGMLEDGKKVDSSRDRNKPFKFMLGKQEVIRGWE
EGVAQMSVGQRAKLTISPDYAYGATGHPGIIPPHATLVFDVELLKLE
SEQ ID NO: 132 Linker
AGCGGAGGAGGATCCGGA
SEQ ID NO: 133 Linker
SGGGSG
SEQ ID NO: 134 Caspase-9
GTGGACGGGTTTGGAGATGTGGGAGCCCTGGAATCCCTGCGGGGCAATGCCGATCTGGCTT
ACATCCTGTCTATGGAGCCTTGCGGCCACTGTCTGATCATTAACAATGTGAACTTCTGCAGAG
AGAGCGGGCTGCGGACCAGAACAGGATCCAATATTGACTGTGAAAAGCTGCGGAGAAGGTT
CTCTAGTCTGCACTTTATGGTCGAGGTGAAAGGCGATCTGACCGCTAAGAAAATGGTGCTGG
CCCTGCTGGAACTGGCTCGGCAGGACCATGGGGCACTGGATTGCTGCGTGGTCGTGATCCT
GAGTCACGGCTGCCAGGCTTCACATCTGCAGTTCCCTGGGGCAGTCTATGGAACTGACGGCT
GTCCAGTCAGCGTGGAGAAGATCGTGAACATCTTCAACGGCACCTCTTGCCCAAGTCTGGGC
GGGAAGCCCAAACTGTTCTTTATTCAGGCCTGTGGAGGCGAGCAGAAAGATCACGGCTTCGA
AGTGGCTAGCACCTCCCCCGAGGACGAATCACCTGGAAGCAACCCTGAGCCAGATGCAACC
CCCTTCCAGGAAGGCCTGAGGACATTTGACCAGCTGGATGCCATCTCAAGCCTGCCCACACC
TTCTGACATTTTCGTCTCTTACAGTACTTTCCCTGGATTTGTGAGCTGGCGCGATCCAAAGTCA
GGCAGCTGGTACGTGGAGACACTGGACGATATCTTTGAGCAGTGGGCCCATTCTGAAGACCT
GCAGAGTCTGCTGCTGCGAGTGGCCAATGCTGTCTCTGTGAAGGGGATCTACAAACAGATGC
CAGGATGCTTCAACTTTCTGAGAAAGAAACTGTTCTTTAAGACCTCCGCATCTAGGGCC
SEQ ID NO: 135 Caspase-9
VDGFGDVGALESLRGNADLAYILSMEPCGHCLIINNVNFCRESGLRTRTGSNIDCEKLRRRFSSLH
FMVEVKGDLTAKKMVLALLELARQDHGALDCCVVVILSHGCQASHLQFPGAVYGTDGCPVSVEKI
VNIFNGTSCPSLGGKPKLFFIQACGGEQKDHGFEVASTSPEDESPGSNPEPDATPFQEGLRTFDQ
LDAISSLPTPSDIFVSYSTFPGFVSWRDPKSGSWYVETLDDIFEQWAHSEDLQSLLLRVANAVSVK
GIYKQMPGCFNFLRKKLFFKTSASRA
SEQ ID NO: 136 Linker
CCGCGG
SEQ ID NO: 137 Linker
PR
SEQ ID NO: 138 T2A
GAAGGCCGAGGGAGCCTGCTGACATGTGGCGATGTGGAGGAAAACCCAGGACCA
SEQ ID NO: 139 T2A
EGRGSLLTCGDVEENPGP
SEQ ID NO: 140 Linker
CCATGG
SEQ ID NO: 141 Linker
PW
SEQ ID NO: 142 Signal peptide
ATGGAGTTTGGACTTTCTTGGTTGTTTTTGGTGGCAATTCTGAAGGGTGTCCAGTGTAGCAGG
SEQ ID NO: 143 Signal peptide
MEFGLSWLFLVAILKGVQCSR
SEQ ID NO: 144 FMC63 variable light chain (anti-CD19)
GACATCCAGATGACACAGACTACATCCTCCCTGTCTGCCTCTCTGGGAGACAGAGTCACCAT
CAGTTGCAGGGCAAGTCAGGACATTAGTAAATATTTAAATTGGTATCAGCAGAAACCAGATGG
AACTGTTAAACTCCTGATCTACCATACATCAAGATTACACTCAGGAGTCCCATCAAGGTTCAGT
GGCAGTGGGTCTGGAACAGATTATTCTCTCACCATTAGCAACCTGGAGCAAGAAGATATTGCC
ACTTACTTTTGCCAACAGGGTAATACGCTTCCGTACACGTTCGGAGGGGGGACTAAGTTGGA
AATAACA
SEQ ID NO: 145 FMC63 variable light chain (anti CD19)
DIQMTQTTSSLSASLGDRVTISCRASQDISKYLNWYQQKPDGTVKLLIYHTSRLHSGVPSRFSGSG
SGTDYSLTISNLEQEDIATYFCQQGNTLPYTFGGGTKLEIT
SEQ ID NO: 146 Flexible linker
GGCGGAGGAAGCGGAGGTGGGGGC
SEQ ID NO: 147 Flexible linker
GGGSGGGG
SEQ ID NO: 148 FMC63 variable heavy chain (anti-CD19)
GAGGTGAAACTGCAGGAGTCAGGACCTGGCCTGGTGGCGCCCTCACAGAGCCTGTCCGTCA
CATGCACTGTCTCAGGGGTCTCATTACCCGACTATGGTGTAAGCTGGATTCGCCAGCCTCCA
CGAAAGGGTCTGGAGTGGCTGGGAGTAATATGGGGTAGTGAAACCACATACTATAATTCAGC
TCTCAAATCCAGACTGACCATCATCAAGGACAACTCCAAGAGCCAAGTTTTCTTAAAAATGAAC
AGTCTGCAAACTGATGACACAGCCATTTACTACTGTGCCAAACATTATTACTACGGTGGTAGC
TATGCTATGGACTACTGGGGTCAAGGAACCTCAGTCACCGTCTCCTCA
SEQ ID NO: 149 FMC63 variable heavy chain (anti CD19)
EVKLQESGPGLVAPSQSLSVTCTVSGVSLPDYGVSWIRQPPRKGLEWLGVIWGSETTYYNSALK
SRLTIIKDNSKSQVFLKMNSLQTDDTAIYYCAKHYYYGGSYAMDYWGQGTSVTVSS
SEQ ID NO: 150 Linker
GGATCC
SEQ ID NO: 151 Linker
GS
SEQ ID NO: 152 CD34 minimal epitope
GAACTTCCTACTCAGGGGACTTTCTCAAACGTTAGCACAAACGTAAGT
SEQ ID NO: 153 CD34 minimal epitope
ELPTQGTFSNVSTNVS
SEQ ID NO: 154 CD8 α stalk domain
CCCGCCCCAAGACCCCCCACACCTGCGCCGACCATTGCTTCTCAACCCCTGAGTTTGAGACC
CGAGGCCTGCCGGCCAGCTGCCGGCGGGGCCGTGCATACAAGAGGACTCGATTTCGCTTGC
GAC
SEQ ID NO: 155 CD8 α stalk domain
PAPRPPTPAPTIASQPLSLRPEACRPAAGGAVHTRGLDFACD
SEQ ID NO: 156 CD8 α transmembrane domain
ATCTATATCTGGGCACCTCTCGCTGGCACCTGTGGAGTCCTTCTGCTCAGCCTGGTTATTACT
CTGTACTGTAATCACCGGAATCGCCGCCGCGTTTGTAAGTGTCCCAGG
SEQ ID NO: 157 CD8 α transmembrane domain
IYIWAPLAGTCGVLLLSLVITLYCNHRNRRRVCKCPR
SEQ ID NO: 158 Linker
GTCGAC
SEQ ID NO: 159 Linker
VD
SEQ ID NO: 160 CD3 zeta
AGAGTGAAGTTCAGCAGGAGCGCAGACGCCCCCGCGTACCAGCAGGGCCAGAACCAGCTCT
ATAACGAGCTCAATCTAGGACGAAGAGAGGAGTACGATGTTTTGGACAAGAGACGTGGCCGG
GACCCTGAGATGGGGGGAAAGCCGAGAAGGAAGAACCCTCAGGAAGGCCTGTACAATGAAC
TGCAGAAAGATAAGATGGCGGAGGCCTACAGTGAGATTGGGATGAAAGGCGAGCGCCGGAG
GGGCAAGGGGCACGATGGCCTTTACCAGGGTCTCAGTACAGCCACCAAGGACACCTACGAC
GCCCTTCACATGCAGGCCCTGCCCCCTCGC
SEQ ID NO: 161 CD3 zeta
RVKFSRSADAPAYQQGQNQLYNELNLGRREEYDVLDKRRGRDPEMGGKPRRKNPQEGLYNEL
QKDKMAEAYSEIGMKGERRRGKGHDGLYQGLSTATKDTYDALHMQALPPR
Provided below is an example of a plasmid insert coding for a
chimeric antigen receptor that binds to Her2/Neu. The chimeric
antigen receptor may be further modified by including
costimulatory polypeptides such as, for example, but not
limited to, CD28, OX40, and 4-1BB.
SEQ ID NO: 162 Signal peptide
ATGGAGTTTGGACTTTCTTGGTTGTTTTTGGTGGCAATTCTGAAGGGTGTCCAGTGTAGCAGG
SEQ ID NO: 163 Signal peptide
MEFGLSWLFLVAILKGVQCSR
SEQ ID NO: 164 FRP5 variable light chain (anti-Her2)
GACATCCAATTGACACAATCACACAAATTTCTCTCAACTTCTGTAGGAGACAGAGTGAGCATA
ACCTGCAAAGCATCCCAGGACGTGTACAATGCTGTGGCTTGGTACCAACAGAAGCCTGGACA
ATCCCCAAAATTGCTGATTTATTCTGCCTCTAGTAGGTACACTGGGGTACCTTCTCGGTTTAC
GGGCTCTGGGTCCGGACCAGATTTCACGTTCACAATCAGTTCCGTTCAAGCTGAAGACCTCG
CTGTTTATTTTTGCCAGCAGCACTTCCGAACCCCTTTTACTTTTGGCTCAGGCACTAAGTTGGA
AATCAAGGCTTTG
SEQ ID NO: 165 FRP5 variable light chain (anti-Her2)
DIQLTQSHKFLSTSVGDRVSITCKASQDVYNAVAWYQQKPGQSPKLLIYSASSRYTGVPSRFTGS
GSGPDFTFTISSVQAEDLAVYFCQQHFRTPFTFGSGTKLEIKAL
SEQ ID NO: 166 Flexible linker
GGCGGAGGAAGCGGAGGTGGGGGC
SEQ ID NO: 167 Flexible linker
GGGSGGGG
SEQ ID NO: 168 FRP5 variable heavy chain (anti-Her2/Neu)
GAAGTCCAATTGCAACAGTCAGGCCCCGAATTGAAAAAGCCCGGCGAAACAGTGAAGATATC
TTGTAAAGCCTCCGGTTACCCTTTTACGAACTATGGAATGAACTGGGTCAAACAAGCCCCTGG
ACAGGGATTGAAGTGGATGGGATGGATCAATACATCAACAGGCGAGTCTACCTTCGCAGATG
ATTTCAAAGGTCGCTTTGACTTCTCACTGGAGACCAGTGCAAATACCGCCTACCTTCAGATTA
ACAATCTTAAAAGCGAGGATATGGCAACCTACTTTTGCGCAAGATGGGAAGTTTATCACGGGT
ACGTGCCATACTGGGGACAAGGAACGACAGTGACAGTTAGTAGC
SEQ ID NO: 169 FRP5 variable heavy chain (anti-Her2/Neu)
EVQLQQSGPELKKPGETVKISCKASGYPFTNYGMNWVKQAPGQGLKWMGWINTSTGESTFADD
FKGRFDFSLETSANTAYLQINNLKSEDMATYFCARWEVYHGYVPYWGQGTTVTVSS
SEQ ID NO: 170 Linker
GGATCC
SEQ ID NO: 171 Linker
GS
SEQ ID NO: 172 CD34 minimal epitope
GAACTTCCTACTCAGGGGACTTTCTCAAACGTTAGCACAAACGTAAGT
SEQ ID NO: 173 CD34 minimal epitope
ELPTQGTFSNVSTNVS
SEQ ID NO: 174 CD8 alpha stalk
CCCGCCCCAAGACCCCCCACACCTGCGCCGACCATTGCTTCTCAACCCCTGAGTTTGAGACC
CGAGGCCTGCCGGCCAGCTGCCGGCGGGGCCGTGCATACAAGAGGACTCGATTTCGCTTGC
GAC
SEQ ID NO: 175 CD8 alpha stalk
PAPRPPTPAPTIASQPLSLRPEACRPAAGGAVHTRGLDFACD
SEQ ID NO: 176 CD8 alpha transmembrane region
ATCTATATCTGGGCACCTCTCGCTGGCACCTGTGGAGTCCTTCTGCTCAGCCTGGTTATTACT
CTGTACTGTAATCACCGGAATCGCCGCCGCGTTTGTAAGTGTCCCAGG
SEQ ID NO: 177 CD8 alpha transmembrane region
IYIWAPLAGTCGVLLLSLVITLYCNHRNRRRVCKCPR
SEQ ID NO: 178 Linker
Ctcgag
SEQ ID NO: 179 Linker
LE
SEQ ID NO: 180 CD3 zeta cytoplasmic domain
AGAGTGAAGTTCAGCAGGAGCGCAGACGCCCCCGCGTACCAGCAGGGCCAGAACCAGCTCT
ATAACGAGCTCAATCTAGGACGAAGAGAGGAGTACGATGTTTTGGACAAGAGACGTGGCCGG
GACCCTGAGATGGGGGGAAAGCCGAGAAGGAAGAACCCTCAGGAAGGCCTGTACAATGAAC
TGCAGAAAGATAAGATGGCGGAGGCCTACAGTGAGATTGGGATGAAAGGCGAGCGCCGGAG
GGGCAAGGGGCACGATGGCCTTTACCAGGGTCTCAGTACAGCCACCAAGGACACCTACGAC
GCCCTTCACATGCAGGCCCTGCCCCCTCGC
SEQ ID NO: 181 CD3 zeta cytoplasmic domain
RVKFSRSADAPAYQQGQNQLYNELNLGRREEYDVLDKRRGRDPEMGGKPRRKNPQEGLYNEL
QKDKMAEAYSEIGMKGERRRGKGHDGLYQGLSTATKDTYDALHMQALPPR
Additional sequences
SEQ ID NO: 182, CD28 nt
TTCTGGGTACTGGTTGTAGTCGGTGGCGTACTTGCTTGTTATTCTCTTCTTGTTACCGTAGCCT
TCATTATATTCTGGGTCCGATCAAAGCGCTCAAGACTCCTCCATTCCGATTATATGAACATGAC
ACCTCGCCGACCTGGTCCTACACGCAAACATTATCAACCCTACGCACCCCCCCGAGACTTCG
CTGCTTATCGATCC
SEQ ID NO: 183, CD28 aa
FWVLVVVGGVLACYSLLVTVAFIIFWVRSKRSRLLHSDYMNMTPRRPGPTRKHYQPYAPPRDFAA
YRS
SEQ ID NO: 184, OX40 nt
GTTGCCGCCATCCTGGGCCTGGGCCTGGTGCTGGGGCTGCTGGGCCCCCTGGCCATCCTG
CTGGCCCTGTACCTGCTCCGGGACCAGAGGCTGCCCCCCGATGCCCACAAGCCCCCTGGGG
GAGGCAGTTTCCGGACCCCCATCCAAGAGGAGCAGGCCGACGCCCACTCCACCCTGGCCAA
GATC
SEQ ID NO: 185, OX40 aa
VAAILGLGLVLGLLGPLAILLALYLLRRDQRLPPDAHKPPGGGSFRTPIQEEQADAHSTLAKI
SEQ ID NO: 186, 4-1BB nt
AGTGTAGTTAAAAGAGGAAGAAAAAAGTTGCTGTATATATTTAAACAACCATTTATGAGACCAG
TGCAAACCACCCAAGAAGAAGACGGATGTTCATGCAGATTCCCAGAAGAAGAAGAAGGAGGA
TGTGAATTG
SEQ ID NO: 187, 4-1BB aa
SVVKRGRKKLLYIFKQPFMRPVQTTQEEDGCSCRFPEEEEGGCEL

### Expression of MyD88/CD40 Chimeric Antigen Receptors and Chimeric Stimulating Molecules

[0692] The following examples discuss the compositions and methods relating to MyD88/CD40 chimeric antigen receptors and chimeric stimulating molecules, as provided in this application. Also included are compositions and methods related to a Caspase-9-based safety switch, and its use in cells that express the MyD88/CD40 chimeric antigen receptors or chimeric stimulating molecules.

### Example 11: Design and Activity of MyD88/CD40 Chimeric Antigen Receptors

### Design of MC-CAR Constructs

[0693] Based on the activation data from inducible MyD88/CD40 experiments, the potential of MC signaling in a CAR molecule in place of conventional endodomains (e.g., CD28 and 4-1BB) was examined. MC (without AP1903-binding FKBPv36 regions) was subcloned into the PSCA.ζ to emulate the position of the CD28 endodomain. Retrovirus was generated for each of the three constructs, transduced human T cells and subsequently measured transduction efficiency demonstrating that PSCA.MC.ζ could be expressed. To confirm that T cells bearing each of these CAR constructs retained their ability to recognize PSCA⁺ tumor cells, 6-hour cytotoxicity assays were performed, which showed lysis of Capan-1 target cells. Therefore, the addition of MC into the cytoplasmic region of a CAR molecule does not affect CAR expression or the recognition of antigen on target cells.

[0694] MC costimulation enhances T cell killing, proliferation and survival in CAR-modified T cells As demonstrated in short-term cytotoxicity assays, each of the three CAR designs showed the capacity to recognize and lyse Capan-1 tumor cells. Cytolytic effector function in effector T cells is mediated by the release of pre-formed granzymes and perforin following tumor recognition, and activation through CD3ζ is sufficient to induce this process without the need for costimulation. First generation CAR T cells (e.g., CARs constructed with only the CD3 cytoplasmic region) can lyse tumor cells; however, survival and proliferation is impaired due to lack of costimulation. Hence, the addition of CD28 or 4-1BB co-stimulating domains constructs has significantly improved the survival and proliferative capacity of CAR T cells.

[0695] To examine whether MC can similarly provide costimulating signals affecting survival and proliferation, coculture assays were performed with PSCA⁺ Capan-1 tumor cells under high tumor:T cell ratios (1:1, 1:5, 1:10 T cell to tumor cell). When T cell and tumor cell numbers were equal (1:1), there was efficient killing of Capan-1-GFP cells from all three constructs compared to non-transduced control T cells. However, when the CAR T cells were challenged with high numbers of tumor cells (1:10), there was a significant reduction of Capan-1-GFP tumor cells only when the CAR molecule contained either MC or CD28.

[0696] To further examine the mechanism of costimulation by these two CARs cell viability and proliferation was assayed. PSCA CARs containing MC or CD28 showed improved survival compared to non-transduced T cells and the CD3 only CAR, and T cell proliferation by PSCA.MC.ζ and PSCA.28.ζ was significantly enhanced. As other groups have shown that CARs that contain co-stimulating signaling regions produce IL-2, a key survival and growth molecule for T cells (4), ELISAs were performed on supernatants from CAR T cells challenged with Capan-1 tumor cells. Although PSCA.28.ζ produced high levels of IL-2, PSCA.MC.ζ signaling also produced significant levels of IL-2, which likely contributes to the observed T cell survival and expansion in these assays. Additionally, IL-6 production by CAR-modified T cells was examined, as IL-6 has been implicated as a key cytokine in the potency and efficacy of CAR-modified T cells (15). In contrast to IL-2, PSCA.MC.ζ produced higher levels of IL-6 compared to PSCA.28.ζ, consistent with the observations that iMC activation in primary T cells induces IL-6. Together, these data suggest that co-stimulation through MC produces similar effects to that of CD28, whereby following tumor cell recognition, CAR-modified T cells produce IL-2 and IL-6, which enhance T cell survival

[0697] Immunotherapy using CAR-modified T cells holds great promise for the treatment of a variety of malignancies. While CARs were first designed with a single signaling domain (e.g., CD3ζ, (16-19) clinical trials evaluating the feasibility of CAR immunotherapy showed limited clinical benefit.(1, 2, 20, 21) This has been primarily attributed to the incomplete activation of T cells following tumor recognition, which leads to limited persistence and expansion in vivo.(22) To address this deficiency, CARs have been engineered to include another stimulating domain, often derived from the cytoplasmic portion of T cell costimulating molecules including CD28, 4-1BB, OX40, ICOS and DAP10, (4,23-30) which allow CAR T cells to receive appropriate costimulation upon engagement of the target antigen. Indeed, clinical trials conducted with anti-CD19 CARs bearing CD28 or 4-1BB signaling domains for the treatment of refractory acute lymphoblastic leukemia (ALL) have demonstrated impressive T cell persistence, expansion and serial tumor killing following adoptive transfer. (6-8)

[0698] CD28 costimulation provides a clear clinical advantage for the treatment of CD19⁺ lymphomas. Savoldo and colleagues conducted a CAR-T cell clinical trial comparing first (CD19.ζ) and second generation CARs (CD19.28.ζ) and found that CD28 enhanced T cell persistence and expansion following adoptive transfer.31 One of the principal functions of second generation CARs is the ability to produce IL-2 that supports T cell survival and growth through activation of the NFAT transcription factor by CD3ζ (signal 1), and NF-κB (signal 2) by CD28 or 4-1BB.32 This suggested other molecules that similarly activated NF-κB might be paired with the CD3ζ chain within a CAR molecule. Our approach has employed a T cell costimulating molecule that was originally developed as an adjuvant for a dendritic cell (DC) vaccine.(12,33) For full activation or licensing of DCs, TLR signaling is usually involved in the upregulation of the TNF family member, CD40, which interacts with CD40L on antigen-primed CD4⁺ T cells. Because iMC was a potent activator of NF-κB in DCs, transduction of T cells with CARs that incorporated MyD88 and CD40 might provide the required costimulation (signal 2) to T cells, and enhance their survival and proliferation.

[0699] A set of experiments was performed to examine whether MyD88, CD40 or both components were required for optimum T cell stimulation using the iMC molecule. Remarkably, it was found that neither MyD88 nor CD40 could sufficiently induce T cell activation, as measured by cytokine production (IL-2 and IL-6), but when combined as a single fusion protein, could induce potent T cell activation. A PSCA CAR incorporating MC was constructed and its function was subsequently compared against a first (PSCA.ζ) and second generation (PSCA.28.ζ) CAR. Here, it was found that MC enhanced survival and proliferation of CAR T cells to a comparable level as the CD28 endodomain, suggesting that costimulation was sufficient. While PSCA.MC.ζ CAR-transduced T cells produced lower levels of IL-2 than PSCA.28., the secreted levels were significantly higher than non-transduced T cells and T cells transduced with the PSCA.ζ CAR. On the other hand, PSCA.MC.ζ CAR-transduced T cells secreted significantly higher levels of IL-6, an important cytokine associated with T cell activation, than PSCA.28.ζ transduced T cells, indicating that MC conferred unique properties to CAR function that may translate to improved tumor cell killing in vivo. These experiments indicate that MC can activate NF-κB (signal 2) following antigen recognition by the extracellular CAR domain.

[0700] Design and Functional Validation of MC-CAR.

[0701] Three PSCA CAR constructs were designed incorporating only CD3ζ, or with CD28 or MC endodomains. Transduction efficiency (percentage) was measured by anti-CAR-APC (recognizing the IgG1 CH₂CH₃ domain). C) Flow cytometry analysis demonstrating high transduction efficiency of T cells with PSCA.MC.ζ CAR. D) Analysis of specific lysis of PSCA⁺ Capan-1 tumor cells by CAR-modified T cells in a 6-hour LDH release assay at a ratio of 1:1 T cells to tumor cells.

[0702] MC-CAR modified T cells kill Capan-1 tumor cells in long-term coculture assays. Flow cytometric analysis of CAR-modified and non-transduced T cells cultured with Capan-1-GFP tumor cells after 7 days in culture at a 1:1 ratio. Quantitation of viable GFP⁺ cells by flow cytometry in coculture assays at a 1:1 and 1:10 T cell to tumor cell ratio.

[0703] MC and CD28 costimulation enhance T cell survival, proliferation and cytokine production. T cells isolated from 1:10 T cell to tumor cell coculture assays were assayed for cell viability and cell number to assess survival and proliferation in response to tumor cell exposure. Supernatants from coculture assays were subsequently measured for IL-2 and IL-6 production by ELISA.

[0704] Design of inducible costimulating molecules and effect on T cell activation. Four vectors were designed incorporating FKBPv36 AP1903-binding domains (Fv′.Fv) alone, or with MyD88, CD40 or the MyD88/CD40 fusion protein. Transduction efficiency of primary activated T cells using CD3⁺CD19⁺ flow cytometric analysis. Analysis of IFN-γ production of modified T cells following activation with and without 10 nM AP1903. Analysis of IL-6 production of modified T cells following activation with and without 10 nM AP1903.

[0705] Apart from survival and growth advantages, MC-induced costimulation may also provide additional functions to CAR-modified T cells. Medzhitov and colleagues recently demonstrated that MyD88 signaling was critical for both Th1 and Th17 responses and that it acted via IL-1 to render CD4⁺ T cells refractory to regulatory T cell (Treg)-driven inhibition (34). Experiments with iMC show that IL-1α and β are secreted following AP1903 activation. In addition, Martin et al demonstrated that CD40 signaling in CD8⁺ T cells via Ras, PI3K and protein kinase C, result in NF-κB-dependent induction of cytotoxic mediators granzyme and perforin that lyse CD4⁺CD25⁺ Treg cells (35). Thus, MyD88 and CD40 co-activation may render CAR-T cells resistant to the immunosuppressive effects of Treg cells, a function that could be critically important in the treatment of solid tumors and other types of cancers.

[0706] In summary, MC can be incorporated into a CAR molecule and primary T cells transduced with retrovirus can express PSCA.MC.ζ without overt toxicity or CAR stability issues. Further, MC appears to provide similar costimulation to that of CD28, where transduced T cells show improved survival, proliferation and tumor killing compared to T cells transduced with a first generation CAR.

### Example 12: References

[0707] The following references are cited in, or provide additional information that may be relevant, including, for example, in Example 11.
[0708] 1. Till B G, Jensen M C, Wang J, et al: CD20-specific adoptive immunotherapy for lymphoma using a chimeric antigen receptor with both CD28 and 4-1BB domains: pilot clinical trial results. Blood 119:3940-50, 2012.
[0709] 2. Pule M A, Savoldo B, Myers G D, et al: Virus-specific T cells engineered to coexpress tumor-specific receptors: persistence and antitumor activity in individuals with neuroblastoma. Nat Med 14:1264-70, 2008.
[0710] 3. Kershaw M H, Westwood J A, Parker L L, et al: A phase 1 study on adoptive immunotherapy using gene-modified T cells for ovarian cancer. Clin Cancer Res 12:6106-15, 2006.
[0711] 4. Carpenito C, Milone M C, Hassan R, et al: Control of large, established tumor xenografts with genetically retargeted human T cells containing CD28 and CD137 domains. Proc Natl Acad Sci USA 106:3360-5, 2009.
[0712] 5. Song D G, Ye Q, Poussin M, et al: CD27 costimulation augments the survival and antitumor activity of redirected human T cells in vivo. Blood 119:696-706, 2012.
[0713] 6. Kalos M, Levine B L, Porter D L, et al: T cells with chimeric antigen receptors have potent antitumor effects and can establish memory in patients with advanced leukemia. Sci Transl Med 3:95ra73, 2011.
[0714] 7. Porter D L, Levine B L, Kalos M, et al: Chimeric antigen receptor-modified T cells in chronic lymphoid leukemia. N Engl J Med 365:725-33, 2011.
[0715] 8. Brentjens R J, Davila M L, Riviere I, et al: CD19-targeted T cells rapidly induce molecular remissions in adults with chemotherapy-refractory acute lymphoblastic leukemia. Sci Transl Med 5:177ra38, 2013.
[0716] 9. Pule M A, Straathof K C, Dotti G, et al: A chimeric T cell antigen receptor that augments cytokine release and supports clonal expansion of primary human T cells. Mol Ther 12:933-41, 2005.
[0717] 10. Finney H M, Akbar A N, Lawson A D: Activation of resting human primary T cells with chimeric receptors: costimulation from CD28, inducible costimulator, CD134, and CD137 in series with signals from the TCR zeta chain. J Immunol 172:104-13, 2004.
[0718] 11. Guedan S, Chen X, Madar A, et al: ICOS-based chimeric antigen receptors program bipolar TH17/TH1 cells. Blood, 2014.
[0719] 12. Narayanan P, Lapteva N, Seethammagari M, et al: A composite MyD88/CD40 switch synergistically activates mouse and human dendritic cells for enhanced antitumor efficacy. J Clin Invest 121:1524-34, 2011.
[0720] 13. Anurathapan U, Chan R C, Hindi H F, et al: Kinetics of tumor destruction by chimeric antigen receptor-modified T cells. Mol Ther 22:623-33, 2014.
[0721] 14. Craddock J A, Lu A, Bear A, et al: Enhanced tumor trafficking of GD2 chimeric antigen receptor T cells by expression of the chemokine receptor CCR2b. J Immunother 33:780-8, 2010.
[0722] 15. Lee D W, Gardner R, Porter D L, et al: Current concepts in the diagnosis and management of cytokine release syndrome. Blood 124:188-95, 2014.
[0723] 16. Becker M L, Near R, Mudgett-Hunter M, et al: Expression of a hybrid immunoglobulin-T cell receptor protein in transgenic mice. Cell 58:911-21, 1989.
[0724] 17. Goverman J, Gomez S M, Segesman K D, et al: Chimeric immunoglobulin-T cell receptor proteins form functional receptors: implications for T cell receptor complex formation and activation. Cell 60:929-39, 1990.
[0725] 18. Gross G, Waks T, Eshhar Z: Expression of immunoglobulin-T-cell receptor chimeric molecules as functional receptors with antibody-type specificity. Proc Natl Acad Sci USA 86:10024-8, 1989.
[0726] 19. Kuwana Y, Asakura Y, Utsunomiya N, et al: Expression of chimeric receptor composed of immunoglobulin-derived V regions and T-cell receptor-derived C regions. Biochem Biophys Res Commun 149:960-8, 1987.
[0727] 20. Jensen M C, Popplewell L, Cooper L J, et al: Antitransgene rejection responses contribute to attenuated persistence of adoptively transferred CD20/CD19-specific chimeric antigen receptor redirected T cells in humans. Biol Blood Marrow Transplant 16:1245-56, 2010.
[0728] 21. Park J R, Digiusto D L, Slovak M, et al: Adoptive transfer of chimeric antigen receptor re-directed cytolytic T lymphocyte clones in patients with neuroblastoma. Mol Ther 15:825-33, 2007.
[0729] 22. Ramos C A, Dotti G: Chimeric antigen receptor (CAR)-engineered lymphocytes for cancer therapy. Expert Opin Biol Ther 11:855-73, 2011.
[0730] 23. Finney H M, Lawson A D, Bebbington C R, et al: Chimeric receptors providing both primary and costimulatory signaling in T cells from a single gene product. J Immunol 161:2791-7, 1998.
[0731] 24. Hombach A, Weczarkowiecz A, Marquardt T, et al: Tumor-specific T cell activation by recombinant immunoreceptors: CD3 zeta signaling and CD28 costimulation are simultaneously required for efficient IL-2 secretion and can be integrated into one combined CD28/CD3 zeta signaling receptor molecule. J Immunol 167:6123-31, 2001.
[0732] 25. Maher J, Brentjens R J, Gunset G, et al: Human T-lymphocyte cytotoxicity and proliferation directed by a single chimeric TCRzeta/CD28 receptor. Nat Biotechnol 20:70-5, 2002.
[0733] 26. Imai C, Mihara K, Andreansky M, et al: Chimeric receptors with 4-1BB signaling capacity provoke potent cytotoxicity against acute lymphoblastic leukemia. Leukemia 18:676-84, 2004.
[0734] 27. Wang J, Jensen M, Lin Y, et al: Optimizing adoptive polyclonal T cell immunotherapy of lymphomas, using a chimeric T cell receptor possessing CD28 and CD137 costimulatory domains. Hum Gene Ther 18:712-25, 2007.
[0735] 28. Zhao Y, Wang Q J, Yang S, et al: A herceptin-based chimeric antigen receptor with modified signaling domains leads to enhanced survival of transduced T lymphocytes and antitumor activity. J Immunol 183:5563-74, 2009.
[0736] 29. Milone M C, Fish J D, Carpenito C, et al: Chimeric receptors containing CD137 signal transduction domains mediate enhanced survival of T cells and increased antileukemic efficacy in vivo. Mol Ther 17:1453-64, 2009.
[0737] 30. Yvon E, Del Vecchio M, Savoldo B, et al: Immunotherapy of metastatic melanoma using genetically engineered GD2-specific T cells. Clin Cancer Res 15:5852-60, 2009.
[0738] 31. Savoldo B, Ramos C A, Liu E, et al: CD28 costimulation improves expansion and persistence of chimeric antigen receptor-modified T cells in lymphoma patients. J Clin Invest 121:1822-6, 2011.
[0739] 32. Kalinski P, Hilkens C M, Wierenga E A, et al: T-cell priming by type-1 and type-2 polarized dendritic cells: the concept of a third signal. Immunol Today 20:561-7, 1999.
[0740] 33. Kemnade J O, Seethammagari M, Narayanan P, et al: Off-the-shelf Adenoviral-mediated Immunotherapy via Bicistronic Expression of Tumor Antigen and iMyD88/CD40 Adjuvant. Mol Ther, 2012.
[0741] 34. Schenten D, Nish S A, Yu S, et al: Signaling through the adaptor molecule MyD88 in CD4⁺ T cells is required to overcome suppression by regulatory T cells. Immunity 40:78-90, 2014.
[0742] 35. Martin S, Pahari S, Sudan R, et al: CD40 signaling in CD8⁺CD40⁺ T cells turns on contra-T regulatory cell functions. J Immunol 184:5510-8, 2010

### Example 13: MC Costimulation Enhances Function and Proliferation of CD19 CARs

[0743] Experiments similar to those discussed herein, are provided, using an antigen recognition moiety that recognizes the CD19 antigen. It is understood that the vectors provided herein may be modified to construct a MyD88/CD40 CAR construct that targets CD19⁺ tumor cells, which also incorporates an inducible Caspase-9 safety switch.

[0744] To examine whether MC costimulation functioned in CARs targeting other antigens, T cells were modified with either CD19.ζ or with CD19.MC.ζ. The cytotoxicity, activation and survival against CD19⁺ Burkitt's lymphoma cell lines (Raji and Daudi) of the modified cells were assayed. In coculture assays, T cells transduced with either CAR showed killing of CD19⁺ Raji cells at an effector to target ratio as low as 1:1. However, analysis of cytokine production from co-culture assays showed that CD19.MC.ζ transduced T cells produced higher levels of IL-2 and IL-6 compared to CD19.ζ, which is consistent with the costimulatory effects observed with iMC and PSCA CARs containing the MC signaling domain. Further, T cells transduced with CD19.MC.ζ showed enhanced proliferation following activation by Raji tumor cells. These data support earlier experiments demonstrating that MC signaling in CAR molecules improves T cell activation, survival and proliferation following ligation to a target antigen expressed on tumor cells.

pBP0526-SFG.iCasp9wt.2A.CD19scFv.CD34e.CD8stm.MC.
zeta
FKBPv36

SEQ ID NO: 321

ATGCTGGAGGGAGTGCAGGTGGAGACTATTAGCCCCGGAGATGGCAGAAC
ATTCCCCAAAAGAGGACAGACTTGCGTCGTGCATTATACTGGAATGCTGG
AAGACGGCAAGAAGGTGGACAGCAGCCGGGACCGAAACAAGCCCTTCAAG
TTCATGCTGGGGAAGCAGGAAGTGATCCGGGGCTGGGAGGAAGGAGTCGC
ACAGATGTCAGTGGGACAGAGGGCCAAACTGACTATTAGCCCAGACTACG
CTTATGGAGCAACCGGCCACCCCGGGATCATTCCCCCTCATGCTACACTG
GTCTTCGATGTGGAGCTGCTGAAGCTGGAA
FKBPv36

SEQ ID NO: 322

MLEGVQVETISPGDGRTFPKRGQTCVVHYTGMLEDGKKVDSSRDRNKPFK
FMLGKQEVIRGWEEGVAQMSVGQRAKLTISPDYAYGATGHPGIIPPHATL
VFDVELLKLE
Linker

SEQ ID NO: 323

AGCGGAGGAGGATCCGGA
Linker

SEQ ID NO: 324

SGGGSG
Caspase-9

SEQ ID NO: 325

GTGGACGGGTTTGGAGATGTGGGAGCCCTGGAATCCCTGCGGGGCAATGC
CGATCTGGCTTACATCCTGTCTATGGAGCCTTGCGGCCACTGTCTGATCA
TTAACAATGTGAACTTCTGCAGAGAGAGCGGGCTGCGGACCAGAACAGGA
TCCAATATTGACTGTGAAAAGCTGCGGAGAAGGTTCTCTAGTCTGCACTT
TATGGTCGAGGTGAAAGGCGATCTGACCGCTAAGAAAATGGTGCTGGCCC
TGCTGGAACTGGCTCGGCAGGACCATGGGGCACTGGATTGCTGCGTGGTC
GTGATCCTGAGTCACGGCTGCCAGGCTTCACATCTGCAGTTCCCTGGGGC
AGTCTATGGAACTGACGGCTGTCCAGTCAGCGTGGAGAAGATCGTGAACA
TCTTCAACGGCACCTCTTGCCCAAGTCTGGGCGGGAAGCCCAAACTGTTC
TTTATTCAGGCCTGTGGAGGCGAGCAGAAAGATCACGGCTTCGAAGTGGC
TAGCACCTCCCCCGAGGACGAATCACCTGGAAGCAACCCTGAGCCAGATG
CAACCCCCTTCCAGGAAGGCCTGAGGACATTTGACCAGCTGGATGCCATC
TCAAGCCTGCCCACACCTTCTGACATTTTCGTCTCTTACAGTACTTTCCC
TGGATTTGTGAGCTGGCGCGATCCAAAGTCAGGCAGCTGGTACGTGGAGA
CACTGGACGATATCTTTGAGCAGTGGGCCCATTCTGAAGACCTGCAGAGT
CTGCTGCTGCGAGTGGCCAATGCTGTCTCTGTGAAGGGGATCTACAAACA
GATGCCAGGATGCTTCAACTTTCTGAGAAAGAAACTGTTCTTTAAGACCT
CCGCATCTAGGGCC
Caspase-9

SEQ ID NO: 326

VDGFGDVGALESLRGNADLAYILSMEPCGHCLIINNVNFCRESGLRTRTG
SNIDCEKLRRRFSSLHFMVEVKGDLTAKKMVLALLELARQDHGALDCCVV
VILSHGCQASHLQFPGAVYGTDGCPVSVEKIVNIFNGTSCPSLGGKPKLF
FIQACGGEQKDHGFEVASTSPEDESPGSNPEPDATPFQEGLRTFDQLDAI
SSLPTPSDIFVSYSTFPGFVSWRDPKSGSWYVETLDDIFEQWAHSEDLQS
LLLRVANAVSVKGIYKQMPGCFNFLRKKLFFKTSASRA
Linker

SEQ ID NO: 327

CCGCGG
Linker

SEQ ID NO: 328

PR
T2A

SEQ ID NO: 329

GAAGGCCGAGGGAGCCTGCTGACATGTGGCGATGTGGAGGAAAACCCAGG
ACCA
T2A

SEQ ID NO: 330

EGRGSLLTCGDVEENPGP
Linker

SEQ ID NO: 331

CCATGG
Linker

SEQ ID NO: 332

PW
Signal peptide

SEQ ID NO: 333

ATGGAGTTTGGACTTTCTTGGTTGTTTTTGGTGGCAATTCTGAAGGGTGT
CCAGTGTAGCAGG
Signal peptide

SEQ ID NO: 334

MEFGLSWLFLVAILKGVQCSR
FMC63 variable light chain (anti-CD19)

SEQ ID NO: 335

GACATCCAGATGACACAGACTACATCCTCCCTGTCTGCCTCTCTGGGAGA
CAGAGTCACCATCAGTTGCAGGGCAAGTCAGGACATTAGTAAATATTTAA
ATTGGTATCAGCAGAAACCAGATGGAACTGTTAAACTCCTGATCTACCAT
ACATCAAGATTACACTCAGGAGTCCCATCAAGGTTCAGTGGCAGTGGGTC
TGGAACAGATTATTCTCTCACCATTAGCAACCTGGAGCAAGAAGATATTG
CCACTTACTTTTGCCAACAGGGTAATACGCTTCCGTACACGTTCGGAGGG
GGGACTAAGTTGGAAATAACA
FMC63 variable light chain (anti CD19)

SEQ ID NO: 336

DIQMTQTTSSLSASLGDRVTISCRASQDISKYLNWYQQKPDGTVKLLIYH
TSRLHSGVPSRFSGSGSGTDYSLTISNLEQEDIATYFCQQGNTLPYTFGG
GTKLEIT
Flexible linker

SEQ ID NO: 337

GGCGGAGGAAGCGGAGGTGGGGGC
Flexible linker

SEQ ID NO: 338

GGGSGGGG
FMC63 variable heavy chain (anti-CD19)

SEQ ID NO: 339

GAGGTGAAACTGCAGGAGTCAGGACCTGGCCTGGTGGCGCCCTCACAGAG
CCTGTCCGTCACATGCACTGTCTCAGGGGTCTCATTACCCGACTATGGTG
TAAGCTGGATTCGCCAGCCTCCACGAAAGGGTCTGGAGTGGCTGGGAGTA
ATATGGGGTAGTGAAACCACATACTATAATTCAGCTCTCAAATCCAGACT
GACCATCATCAAGGACAACTCCAAGAGCCAAGTTTTCTTAAAAATGAACA
GTCTGCAAACTGATGACACAGCCATTTACTACTGTGCCAAACATTATTAC
TACGGTGGTAGCTATGCTATGGACTACTGGGGTCAAGGAACCTCAGTCAC
CGTCTCCTCA
FMC63 variable heavy chain (anti CD19)

SEQ ID NO: 340

EVKLQESGPGLVAPSQSLSVTCTVSGVSLPDYGVSWIRQPPRKGLEWLGV
IWGSETTYYNSALKSRLTIIKDNSKSQVFLKMNSLQTDDTAIYYCAKHYY
YGGSYAMDYWGQGTSVTVSS
Linker

SEQ ID NO: 341

GGATCC
Linker

SEQ ID NO: 342

GS
CD34 minimal epitope

SEQ ID NO: 343

GAACTTCCTACTCAGGGGACTTTCTCAAACGTTAGCACAAACGTAAGT
CD34 minimal epitope

SEQ ID NO: 344

ELPTQGTFSNVSTNVS
CD8 α stalk domain

SEQ ID NO: 345

CCCGCCCCAAGACCCCCCACACCTGCGCCGACCATTGCTTCTCAACCCCT
GAGTTTGAGACCCGAGGCCTGCCGGCCAGCTGCCGGCGGGGCCGTGCATA
CAAGAGGACTCGATTTCGCTTGCGAC
CD8 α stalk domain

SEQ ID NO: 346

PAPRPPTPAPTIASQPLSLRPEACRPAAGGAVHTRGLDFACD
CD8 α transmembrane domain

SEQ ID NO: 347

ATCTATATCTGGGCACCTCTCGCTGGCACCTGTGGAGTCCTTCTGCTCAG
CCTGGTTATTACTCTGTACTGTAATCACCGGAATCGCCGCCGCGTTTGTA
AGTGTCCCAGG
CD8 α transmembrane domain

SEQ ID NO: 348

IYIWAPLAGTCGVLLLSLVITLYCNHRNRRRVCKCPR
Linker

SEQ ID NO: 349

GTCGAC
Linker

SEQ ID NO: 350

VD
Truncated MyD88 lacking the TIR domain

SEQ ID NO: 351

ATGGCCGCTGGGGGCCCAGGCGCCGGATCAGCTGCTCCCGTATCTTCTAC
TTCTTCTTTGCCGCTGGCTGCTCTGAACATGCGCGTGAGAAGACGCCTCT
CCCTGTTCCTTAACGTTCGCACACAAGTCGCTGCCGATTGGACCGCCCTT
GCCGAAGAAATGGACTTTGAATACCTGGAAATTAGACAACTTGAAACACA
GGCCGACCCCACTGGCAGACTCCTGGACGCATGGCAGGGAAGACCTGGTG
CAAGCGTTGGACGGCTCCTGGATCTCCTGACAAAACTGGGACGCGACGAC
GTACTGCTTGAACTCGGACCTAGCATTGAAGAAGACTGCCAAAAATATAT
CCTGAAACAACAACAAGAAGAAGCCGAAAAACCTCTCCAAGTCGCAGCAG
TGGACTCATCAGTACCCCGAACAGCTGAGCTTGCTGGGATTACTACACTC
GACGACCCACTCGGACATATGCCTGAAAGATTCGACGCTTTCATTTGCTA
TTGCCCCTCTGACATA
Truncated MyD88 lacking the TIR domain

SEQ ID NO: 352

MAAGGPGAGSAAPVSSTSSLPLAALNMRVRRRLSLFLNVRTQVAADWTAL
AEEMDFEYLEIRQLETQADPTGRLLDAWQGRPGASVGRLLDLLTKLGRDD
VLLELGPSIEEDCQKYILKQQQEEAEKPLQVAAVDSSVPRTAELAGITTL
DDPLGHMPERFDAFICYCPSDI
CD40 without the extracellular domain

SEQ ID NO: 353

AAGAAAGTTGCAAAGAAACCCACAAATAAAGCCCCACACCCTAAACAGGA
ACCCCAAGAAATCAATTTCCCAGATGATCTCCCTGGATCTAATACTGCCG
CCCCGGTCCAAGAAACCCTGCATGGTTGCCAGCCTGTCACCCAAGAGGAC
GGAAAAGAATCACGGATTAGCGTACAAGAGAGACAA
CD40 without the extracellular domain

SEQ ID NO: 354

KKVAKKPTNKAPHPKQEPQEINFPDDLPGSNTAAPVQETLHGCQPVTQED
GKESRISVQERQ
CD3 zeta

SEQ ID NO: 355

AGAGTGAAGTTCAGCAGGAGCGCAGACGCCCCCGCGTACCAGCAGGGCCA
GAACCAGCTCTATAACGAGCTCAATCTAGGACGAAGAGAGGAGTACGATG
TTTTGGACAAGAGACGTGGCCGGGACCCTGAGATGGGGGGAAAGCCGAGA
AGGAAGAACCCTCAGGAAGGCCTGTACAATGAACTGCAGAAAGATAAGAT
GGCGGAGGCCTACAGTGAGATTGGGATGAAAGGCGAGCGCCGGAGGGGCA
AGGGGCACGATGGCCTTTACCAGGGTCTCAGTACAGCCACCAAGGACACC
TACGACGCCCTTCACATGCAGGCCCTGCCCCCTCGC
CD3 zeta

SEQ ID NO: 356

RVKFSRSADAPAYQQGQNQLYNELNLGRREEYDVLDKRRGRDPEMGGKPR
RKNPQEGLYNELQKDKMAEAYSEIGMKGERRRGKGHDGLYQGLSTATKDT
YDALHMQALPPR

### Example 14: Cytokine Production of T Cells Co-Expressing a MyD88/CD40 Chimeric Antigen Receptor and Inducible Caspase-9 Polypeptide

[0745] Various chimeric antigen receptor constructs were created to compare cytokine production of transduced T cells after exposure to antigen. The chimeric antigen receptor constructs all had an antigen recognition region that bound to CD19. It is understood that the vectors provided herein may be modified to construct a CAR construct that also incorporates an inducible Caspase-9 safety switch. It is further understood that the CAR construct may further comprise an FRB domain.

### Example 15: An Example of a MyD88/CD40 CAR Construct for Targeting Her2⁺ Tumor Cells

[0746] It is understood that the vectors provided herein may be modified to construct a MyD88/CD40 CAR construct that targets Her2⁺ tumor cells, which also incorporates an inducible Caspase-9 safety switch. It is further understood that the CAR construct may further comprise an FRB domain.

SFG-Her2scFv.CD34e.CD8stm.MC.zeta sequence
SEQ ID NO: 357 Signal peptide
ATGGAGTTTGGACTTTCTTGGTTGTTTTTGGTGGCAATTCTGAAGGGTGTCCAGTGTAGCAGG
SEQ ID NO: 358 Signal peptide
MEFGLSWLFLVAILKGVQCSR
SEQ ID NO: 359 FRP5 variable light chain (anti-Her2)
GACATCCAATTGACACAATCACACAAATTTCTCTCAACTTCTGTAGGAGACAGAGTGAGCATA
ACCTGCAAAGCATCCCAGGACGTGTACAATGCTGTGGCTTGGTACCAACAGAAGCCTGGACA
ATCCCCAAAATTGCTGATTTATTCTGCCTCTAGTAGGTACACTGGGGTACCTTCTCGGTTTAC
GGGCTCTGGGTCCGGACCAGATTTCACGTTCACAATCAGTTCCGTTCAAGCTGAAGACCTCG
CTGTTTATTTTTGCCAGCAGCACTTCCGAACCCCTTTTACTTTTGGCTCAGGCACTAAGTTGGA
AATCAAGGCTTTG
SEQ ID NO: 360 FRP5 variable light chain (anti-Her2)
DIQLTQSHKFLSTSVGDRVSITCKASQDVYNAVAWYQQKPGQSPKLLIYSASSRYTGVPSRFTGS
GSGPDFTFTISSVQAEDLAVYFCQQHFRTPFTFGSGTKLEIKAL
SEQ ID NO: 361 Flexible linker
GGCGGAGGAAGCGGAGGTGGGGGC
SEQ ID NO: 362 Flexible linker
GGGSGGGG
SEQ ID NO: 363 FRP5 variable heavy chain (anti-Her2/Neu)
GAAGTCCAATTGCAACAGTCAGGCCCCGAATTGAAAAAGCCCGGCGAAACAGTGAAGATATC
TTGTAAAGCCTCCGGTTACCCTTTTACGAACTATGGAATGAACTGGGTCAAACAAGCCCCTGG
ACAGGGATTGAAGTGGATGGGATGGATCAATACATCAACAGGCGAGTCTACCTTCGCAGATG
ATTTCAAAGGTCGCTTTGACTTCTCACTGGAGACCAGTGCAAATACCGCCTACCTTCAGATTA
ACAATCTTAAAAGCGAGGATATGGCAACCTACTTTTGCGCAAGATGGGAAGTTTATCACGGGT
ACGTGCCATACTGGGGACAAGGAACGACAGTGACAGTTAGTAGC
SEQ ID NO: 364 FRP5 variable heavy chain (anti-Her2/Neu)
EVQLQQSGPELKKPGETVKISCKASGYPFTNYGMNWVKQAPGQGLKWMGWINTSTGESTFADD
FKGRFDFSLETSANTAYLQINNLKSEDMATYFCARWEVYHGYVPYWGQGTTVTVSS
SEQ ID NO: 365 Linker
GGATCC
SEQ ID NO: 366 Linker
GS
SEQ ID NO: 367 CD34 minimal epitope
GAACTTCCTACTCAGGGGACTTTCTCAAACGTTAGCACAAACGTAAGT
SEQ ID NO: 368 CD34 minimal epitope
ELPTQGTFSNVSTNVS
SEQ ID NO: 369 CD8 alpha stalk
CCCGCCCCAAGACCCCCCACACCTGCGCCGACCATTGCTTCTCAACCCCTGAGTTTGAGACC
CGAGGCCTGCCGGCCAGCTGCCGGCGGGGCCGTGCATACAAGAGGACTCGATTTCGCTTGC
GAC
SEQ ID NO:]370 CD8 alpha stalk
PAPRPPTPAPTIASQPLSLRPEACRPAAGGAVHTRGLDFACD
SEQ ID NO: 371 CD8 alpha transmembrane region
ATCTATATCTGGGCACCTCTCGCTGGCACCTGTGGAGTCCTTCTGCTCAGCCTGGTTATTACT
CTGTACTGTAATCACCGGAATCGCCGCCGCGTTTGTAAGTGTCCCAGG
SEQ ID NO: 372 CD8 alpha transmembrane region
IYIWAPLAGTCGVLLLSLVITLYCNHRNRRRVCKCPR
SEQ ID NO: 373 Linker
Ctcgag
SEQ ID NO: 374 Linker
LE
SEQ ID NO: 375 Truncated MyD88
ATGGCCGCTGGGGGCCCAGGCGCCGGATCAGCTGCTCCCGTATCTTCTACTTCTTCTTTGCC
GCTGGCTGCTCTGAACATGCGCGTGAGAAGACGCCTCTCCCTGTTCCTTAACGTTCGCACAC
AAGTCGCTGCCGATTGGACCGCCCTTGCCGAAGAAATGGACTTTGAATACCTGGAAATTAGA
CAACTTGAAACACAGGCCGACCCCACTGGCAGACTCCTGGACGCATGGCAGGGAAGACCTG
GTGCAAGCGTTGGACGGCTCCTGGATCTCCTGACAAAACTGGGACGCGACGACGTACTGCTT
GAACTCGGACCTAGCATTGAAGAAGACTGCCAAAAATATATCCTGAAACAACAACAAGAAGAA
GCCGAAAAACCTCTCCAAGTCGCAGCAGTGGACTCATCAGTACCCCGAACAGCTGAGCTTGC
TGGGATTACTACACTCGACGACCCACTCGGACATATGCCTGAAAGATTCGACGCTTTCATTTG
CTATTGCCCCTCTGACATA
SEQ ID NO: 376 Truncated MyD88
MAAGGPGAGSAAPVSSTSSLPLAALNMRVRRRLSLFLNVRTQVAADWTALAEEMDFEYLEIRQLE
TQADPTGRLLDAWQGRPGASVGRLLDLLTKLGRDDVLLELGPSIEEDCQKYILKQQQEEAEKPLQ
VAAVDSSVPRTAELAGITTLDDPLGHMPERFDAFICYCPSDI
SEQ ID NO: 377 CD40 cytoplasmic domain
AAGAAAGTTGCAAAGAAACCCACAAATAAAGCCCCACACCCTAAACAGGAACCCCAAGAAATC
AATTTCCCAGATGATCTCCCTGGATCTAATACTGCCGCCCCGGTCCAAGAAACCCTGCATGGT
TGCCAGCCTGTCACCCAAGAGGACGGAAAAGAATCACGGATTAGCGTACAAGAGAGACAA
SEQ ID NO: 378 CD40 cytoplasmic domain
KKVAKKPTNKAPHPKQEPQEINFPDDLPGSNTAAPVQETLHGCQPVTQEDGKESRISVQERQ
SEQ ID NO: 379 Linker
gcggccgcagtcgag
SEQ ID NO: 380 Linker
AAAVE
SEQ ID NO: 381 CD3 zeta cytoplasmic domain
AGAGTGAAGTTCAGCAGGAGCGCAGACGCCCCCGCGTACCAGCAGGGCCAGAACCAGCTCT
ATAACGAGCTCAATCTAGGACGAAGAGAGGAGTACGATGTTTTGGACAAGAGACGTGGCCGG
GACCCTGAGATGGGGGGAAAGCCGAGAAGGAAGAACCCTCAGGAAGGCCTGTACAATGAAC
TGCAGAAAGATAAGATGGCGGAGGCCTACAGTGAGATTGGGATGAAAGGCGAGCGCCGGAG
GGGCAAGGGGCACGATGGCCTTTACCAGGGTCTCAGTACAGCCACCAAGGACACCTACGAC
GCCCTTCACATGCAGGCCCTGCCCCCTCGC
SEQ ID NO: 382 CD3 zeta cytoplasmic domain
RVKFSRSADAPAYQQGQNQLYNELNLGRREEYDVLDKRRGRDPEMGGKPRRKNPQEGLYNEL
QKDKMAEAYSEIGMKGERRRGKGHDGLYQGLSTATKDTYDALHMQALPPR
Example 16: Additional Sequences
SEQ ID NO: 383, ΔCasp9 (res. 135-416)
G F G D V G A L E S L R G N A D L A Y I L S M E P C G H C L I I N N V N
F C R E S G L R T R T G S N I D C E K L R R R F S S L H F M V E V K G D
L T A K K M V L A L L E L A R Q D H G A L D C C V V V I L S H G C Q A S
H L Q F P G A V Y G T D G C P V S V E K I V N I F N G T S C P S L G G K
P K L F F I Q A C G G E Q K D H G F E V A S T S P E D E S P G S N P E P
D A T P F Q E G L R T F D Q L D A I S S L P T P S D I F V S Y S T F P G
F V S W R D P K S G S W Y V E T L D D I F E Q W A H S E D L Q S L L L
R V A N A V S V K G I Y K Q M P G C F N F L R K K L F F K T S
SEQ ID NO: 384, ΔCasp9 (res. 135-416) D330A, nucleotide sequence
GGATTTGGTGATGTCGGTGCTCTTGAGAGTTTGAGGGGAAATGCAGATTTGGCTTACATCCTG
AGCATGGAGCCCTGTGGCCACTGCCTCATTATCAACAATGTGAACTTCTGCCGTGAGTCCGG
GCTCCGCACCCGCACTGGCTCCAACATCGACTGTGAGAAGTTGCGGCGTCGCTTCTCCTCGC
TGCATTTCATGGTGGAGGTGAAGGGCGACCTGACTGCCAAGAAAATGGTGCTGGCTTTGCTG
GAGCTGGCGCgGCAGGACCACGGTGCTCTGGACTGCTGCGTGGTGGTCATTCTCTCTCACG
GCTGTCAGGCCAGCCACCTGCAGTTCCCAGGGGCTGTCTACGGCACAGATGGATGCCCTGT
GTCGGTCGAGAAGATTGTGAACATCTTCAATGGGACCAGCTGCCCCAGCCTGGGAGGGAAG
CCCAAGCTCTTTTTCATCCAGGCCTGTGGTGGGGAGCAGAAAGACCATGGGTTTGAGGTGGC
CTCCACTTCCCCTGAAGACGAGTCCCCTGGCAGTAACCCCGAGCCAGATGCCACCCCGTTCC
AGGAAGGTTTGAGGACCTTCGACCAGCTGGCCGCCATATCTAGTTTGCCCACACCCAGTGAC
ATCTTTGTGTCCTACTCTACTTTCCCAGGTTTTGTTTCCTGGAGGGACCCCAAGAGTGGCTCC
TGGTACGTTGAGACCCTGGACGACATCTTTGAGCAGTGGGCTCACTCTGAAGACCTGCAGTC
CCTCCTGCTTAGGGTCGCTAATGCTGTTTCGGTGAAAGGGATTTATAAACAGATGCCTGGTTG
CTTTAATTTCCTCCGGAAAAAACTTTTCTTTAAAACATCA
SEQ ID NO: 385, ΔCasp9 (res. 135-416) D330A, amino acid sequence
G F G D V G A L E S L R G N A D L A Y I L S M E P C G H C L I I N N V N
F C R E S G L R T R T G S N I D C E K L R R R F S S L H F M V E V K G D
L T A K K M V L A L L E L A R Q D H G A L D C C V V V I L S H G C Q A S
H L Q F P G A V Y G T D G C P V S V E K I V N I F N G T S C P S L G G K
P K L F F I Q A C G G E Q K D H G F E V A S T S P E D E S P G S N P E P
D A T P F Q E G L R T F D Q L A A I S S L P T P S D I F V S Y S T F P G F
V S W R D P K S G S W Y V E T L D D I F E Q W A H S E D L Q S L L L R
V A N A V S V K G I Y K Q M P G C F N F L R K K L F F K T S
SEQ ID NO: 386, ΔCasp9 (res. 135-416) N405Q nucleotide sequence
GGATTTGGTGATGTCGGTGCTCTTGAGAGTTTGAGGGGAAATGCAGATTTGGCTTACATCCTG
AGCATGGAGCCCTGTGGCCACTGCCTCATTATCAACAATGTGAACTTCTGCCGTGAGTCCGG
GCTCCGCACCCGCACTGGCTCCAACATCGACTGTGAGAAGTTGCGGCGTCGCTTCTCCTCGC
TGCATTTCATGGTGGAGGTGAAGGGCGACCTGACTGCCAAGAAAATGGTGCTGGCTTTGCTG
GAGCTGGCGCgGCAGGACCACGGTGCTCTGGACTGCTGCGTGGTGGTCATTCTCTCTCACG
GCTGTCAGGCCAGCCACCTGCAGTTCCCAGGGGCTGTCTACGGCACAGATGGATGCCCTGT
GTCGGTCGAGAAGATTGTGAACATCTTCAATGGGACCAGCTGCCCCAGCCTGGGAGGGAAG
CCCAAGCTCTTTTTCATCCAGGCCTGTGGTGGGGAGCAGAAAGACCATGGGTTTGAGGTGGC
CTCCACTTCCCCTGAAGACGAGTCCCCTGGCAGTAACCCCGAGCCAGATGCCACCCCGTTCC
AGGAAGGTTTGAGGACCTTCGACCAGCTGGACGCCATATCTAGTTTGCCCACACCCAGTGAC
ATCTTTGTGTCCTACTCTACTTTCCCAGGTTTTGTTTCCTGGAGGGACCCCAAGAGTGGCTCC
TGGTACGTTGAGACCCTGGACGACATCTTTGAGCAGTGGGCTCACTCTGAAGACCTGCAGTC
CCTCCTGCTTAGGGTCGCTAATGCTGTTTCGGTGAAAGGGATTTATAAACAGATGCCTGGTTG
CTTTCAGTTCCTCCGGAAAAAACTTTTCTTTAAAACATCA
SEQ ID NO: 387, ΔCasp9 (res. 135-416) N405Q amino acid sequence
G F G D V G A L E S L R G N A D L A Y I L S M E P C G H C L I I N N V N
F C R E S G L R T R T G S N I D C E K L R R R F S S L H F M V E V K G D
L T A K K M V L A L L E L A R Q D H G A L D C C V V V I L S H G C Q A S
H L Q F P G A V Y G T D G C P V S V E K I V N I F N G T S C P S L G G K
P K L F F I Q A C G G E Q K D H G F E V A S T S P E D E S P G S N P E P
D A T P F Q E G L R T F D Q L D A I S S L P T P S D I F V S Y S T F P G
F V S W R D P K S G S W Y V E T L D D I F E Q W A H S E D L Q S L L L
R V A N A V S V K G I Y K Q M P G C F Q F L R K K L F F K T S
SEQ ID NO: 388, ΔCasp9 (res. 135-416) D330A N405Q nucleotide sequence
GGATTTGGTGATGTCGGTGCTCTTGAGAGTTTGAGGGGAAATGCAGATTTGGCTTACATCCTG
AGCATGGAGCCCTGTGGCCACTGCCTCATTATCAACAATGTGAACTTCTGCCGTGAGTCCGG
GCTCCGCACCCGCACTGGCTCCAACATCGACTGTGAGAAGTTGCGGCGTCGCTTCTCCTCGC
TGCATTTCATGGTGGAGGTGAAGGGCGACCTGACTGCCAAGAAAATGGTGCTGGCTTTGCTG
GAGCTGGCGCgGCAGGACCACGGTGCTCTGGACTGCTGCGTGGTGGTCATTCTCTCTCACG
GCTGTCAGGCCAGCCACCTGCAGTTCCCAGGGGCTGTCTACGGCACAGATGGATGCCCTGT
GTCGGTCGAGAAGATTGTGAACATCTTCAATGGGACCAGCTGCCCCAGCCTGGGAGGGAAG
CCCAAGCTCTTTTTCATCCAGGCCTGTGGTGGGGAGCAGAAAGACCATGGGTTTGAGGTGGC
CTCCACTTCCCCTGAAGACGAGTCCCCTGGCAGTAACCCCGAGCCAGATGCCACCCCGTTCC
AGGAAGGTTTGAGGACCTTCGACCAGCTGGCCGCCATATCTAGTTTGCCCACACCCAGTGAC
ATCTTTGTGTCCTACTCTACTTTCCCAGGTTTTGTTTCCTGGAGGGACCCCAAGAGTGGCTCC
TGGTACGTTGAGACCCTGGACGACATCTTTGAGCAGTGGGCTCACTCTGAAGACCTGCAGTC
CCTCCTGCTTAGGGTCGCTAATGCTGTTTCGGTGAAAGGGATTTATAAACAGATGCCTGGTTG
CTTTCAGTTCCTCCGGAAAAAACTTTTCTTTAAAACATCA
SEQ ID NO: 389, ΔCasp9 (res. 135-416) D330A N405Q amino acid sequence
G F G D V G A L E S L R G N A D L A Y I L S M E P C G H C L I I N N V N
F C R E S G L R T R T G S N I D C E K L R R R F S S L H F M V E V K G D
L T A K K M V L A L L E L A R Q D H G A L D C C V V V I L S H G C Q A S
H L Q F P G A V Y G T D G C P V S V E K I V N I F N G T S C P S L G G K
P K L F F I Q A C G G E Q K D H G F E V A S T S P E D E S P G S N P E P
D A T P F Q E G L R T F D Q L A A I S S L P T P S D I F V S Y S T F P G F
V S W R D P K S G S W Y V E T L D D I F E Q W A H S E D L Q S L L L R
V A N A V S V K G I Y K Q M P G C F Q F L R K K L F F K T S
SEQ IDNO: 390, Caspase-9.co nucleotide sequence
GTGGACGGGTTTGGAGATGTGGGAGCCCTGGAATCCCTGCGGGGCAATGCCGATCTGGCTT
ACATCCTGTCTATGGAGCCTTGCGGCCACTGTCTGATCATTAACAATGTGAACTTCTGCAGAG
AGAGCGGGCTGCGGACCAGAACAGGATCCAATATTGACTGTGAAAAGCTGCGGAGAAGGTT
CTCTAGTCTGCACTTTATGGTCGAGGTGAAAGGCGATCTGACCGCTAAGAAAATGGTGCTGG
CCCTGCTGGAACTGGCTCGGCAGGACCATGGGGCACTGGATTGCTGCGTGGTCGTGATCCT
GAGTCACGGCTGCCAGGCTTCACATCTGCAGTTCCCTGGGGCAGTCTATGGAACTGACGGCT
GTCCAGTCAGCGTGGAGAAGATCGTGAACATCTTCAACGGCACCTCTTGCCCAAGTCTGGGC
GGGAAGCCCAAACTGTTCTTTATTCAGGCCTGTGGAGGCGAGCAGAAAGATCACGGCTTCGA
AGTGGCTAGCACCTCCCCCGAGGACGAATCACCTGGAAGCAACCCTGAGCCAGATGCAACC
CCCTTCCAGGAAGGCCTGAGGACATTTGACCAGCTGGATGCCATCTCAAGCCTGCCCACACC
TTCTGACATTTTCGTCTCTTACAGTACTTTCCCTGGATTTGTGAGCTGGCGCGATCCAAAGTCA
GGCAGCTGGTACGTGGAGACACTGGACGATATCTTTGAGCAGTGGGCCCATTCTGAAGACCT
GCAGAGTCTGCTGCTGCGAGTGGCCAATGCTGTCTCTGTGAAGGGGATCTACAAACAGATGC
CAGGATGCTTCCAGTTTCTGAGAAAGAAACTGTTCTTTAAGACCTCCGCATCTAGGGCC
SEQ ID NO: 391, Caspase-9.co amino acid sequence
VDGFGDVGALESLRGNADLAYILSMEPCGHCLIINNVNFCRESGLRTRTGSNIDCEKLRRRFSSLH
FMVEVKGDLTAKKMVLALLELARQDHGALDCCVVVILSHGCQASHLQFPGAVYGTDGCPVSVEKI
VNIFNGTSCPSLGGKPKLFFIQACGGEQKDHGFEVASTSPEDESPGSNPEPDATPFQEGLRTFDQ
LDAISSLPTPSDIFVSYSTFPGFVSWRDPKSGSWYVETLDDIFEQWAHSEDLQSLLLRVANAVSVK
GIYKQMPGCFQFLRKKLFFKTSASRA
SEQ ID NO: 392: Caspase9 D330E nucleotide sequence
GTCGACGGATTTGGTGATGTCGGTGCTCTTGAGAGTTTGAGGGGAAATGCAGATTTGGCTTA
CATCCTGAGCATGGAGCCCTGTGGCCACTGCCTCATTATCAACAATGTGAACTTCTGCCGTGA
GTCCGGGCTCCGCACCCGCACTGGCTCCAACATCGACTGTGAGAAGTTGCGGCGTCGCTTC
TCCTCGCTGCATTTCATGGTGGAGGTGAAGGGCGACCTGACTGCCAAGAAAATGGTGCTGGC
TTTGCTGGAGCTGGCGCGGCAGGACCACGGTGCTCTGGACTGCTGCGTGGTGGTCATTCTC
TCTCACGGCTGTCAGGCCAGCCACCTGCAGTTCCCAGGGGCTGTCTACGGCACAGATGGAT
GCCCTGTGTCGGTCGAGAAGATTGTGAACATCTTCAATGGGACCAGCTGCCCCAGCCTGGGA
GGGAAGCCCAAGCTCTTTTTCATCCAGGCCTGTGGTGGGGAGCAGAAAGACCATGGGTTTGA
GGTGGCCTCCACTTCCCCTGAAGACGAGTCCCCTGGCAGTAACCCCGAGCCAGATGCCACC
CCGTTCCAGGAAGGTTTGAGGACCTTCGACCAGCTGGcCGCCATATCTAGTTTGCCCACACC
CAGTGACATCTTTGTGTCCTACTCTACTTTCCCAGGTTTTGTTTCCTGGAGGGACCCCAAGAG
TGGCTCCTGGTACGTTGAGACCCTGGACGACATCTTTGAGCAGTGGGCTCACTCTGAAGACC
TGCAGTCCCTCCTGCTTAGGGTCGCTAATGCTGTTTCGGTGAAAGGGATTTATAAACAGATGC
CTGGTTGCTTTAATTTCCTCCGGAAAAAACTTTTCTTTAAAACATCAGCTAGCAGAGCC
SEQ ID NO: 188: Caspase9 D330E amino acid sequence
VDGFGDVGALESLRGNADLAYILSMEPCGHCLIINNVNFCRESGLRTRTGSNIDCEKLRRRFSS
LHFMVEVKGDLTAKKMVLALLELARQDHGALDCCVVVILSHGCQASHLQFPGAVYGTDGC
PVSVEKIVNIFNGTSCPSLGGKPKLFFIQACGGEQKDHGFEVASTSPEDESPGSNPEPDA
TPFQEGLRTFDQLeAISSLPTPSDIFVSYSTFPGFVSWRDPKSGSWYVETLDDIFEQWAH
SEDLQSLLLRVANAVSVKGIYKQMPGCFNFLRKKLFFKTSASRA
Sequences for pBPO509
pBP0509-SFG-PSCAscFv.CH2CH3.CD28tm.zeta.MyD88/CD40 sequence
SEQ ID NO: 189 Signal peptide
ATGGAGTTTGGACTTTCTTGGTTGTTTTTGGTGGCAATTCTGAAGGGTGTCCAGTGTAGCAGG
SEQ ID NO: 190 Signal peptide
MEFGLSWLFLVAILKGVQCSR
SEQ ID NO: 191 bm2B3 variable light chain
GACATCCAGCTGACACAAAGTCCCAGTAGCCTGTCAGCCAGTGTCGGCGATAGGGTGACAAT
TACATGCTCCGCAAGTAGTAGCGTCAGATTCATACACTGGTACCAGCAGAAGCCTGGGAAGG
CCCCAAAGAGGCTTATCTACGATACCAGTAAACTCGCCTCTGGAGTTCCTAGCCGGTTTTCTG
GATCTGGCAGCGGAACTAGCTACACCCTCACAATCTCCAGTCTGCAACCAGAGGACTTTGCA
ACCTACTACTGCCAGCAATGGAGCAGCTCCCCTTTCACCTTTGGGCAGGGTACTAAGGTGGA
GATCAAG
SEQ ID NO: 192 bm2B3 variable light chain
DIQLTQSPSSLSASVGDRVTITCSASSSVRFIHWYQQKPGKAPKRLIYDTSKLASGVPSRFSGSGS
GTSYTLTISSLQPEDFATYYCQQWSSSPFTFGQGTKVEIK
SEQ ID NO: 193 Flexible linker
GGCGGAGGAAGCGGAGGTGGGGGC
SEQ ID NO: 194 Flexible linker
GGGSGGGG
SEQ ID NO: 195 bm2B3 variable heavy chain
GAGGTGCAGCTTGTAGAGAGCGGGGGAGGCCTCGTACAGCCAGGGGGCTCTCTGCGCCTG
TCATGTGCAGCTTCAGGATTCAATATAAAGGACTATTACATTCACTGGGTACGGCAAGCTCCC
GGTAAGGGCCTGGAATGGATCGGTTGGATCGACCCTGAAAACGGAGATACAGAATTTGTGCC
CAAGTTCCAGGGAAAGGCTACCATGTCTGCCGATACTTCTAAGAATACAGCATACCTTCAGAT
GAATTCTCTCCGCGCCGAGGACACAGCCGTGTATTATTGTAAAACGGGAGGGTTCTGGGGTC
AGGGTACCCTTGTGACTGTGTCTTCC
SEQ ID NO: 196 bm2B3 variable heavy chain
EVQLVESGGGLVQPGGSLRLSCAASGFNIKDYYIHWVRQAPGKGLEWIGWIDPENGDTEFVPKF
QGKATMSADTSKNTAYLQMNSLRAEDTAVYYCKTGGFWGQGTLVTVSS
SEQ ID NO: 197 Linker
GGGGATCCCGCC
SEQ ID NO: 198 Linker
GDPA
SEQ ID NO: 199 IgG1 hinge region
GAGCCCAAATCTCCTGACAAAACTCACACATGCCCA
SEQ ID NO: 200 IgG1 hinge region
EPKSPDKTHTCP
SEQ ID NO: 201 IgG1 CH2 region
CCGTGCCCAGCACCTGAACTCCTGGGGGGACCGTCAGTCTTCCTCTTCCCCCCAAAACCCAA
AGACACCCTCATGATCTCCCGGACCCCTGAGGTCACATGCGTGGTGGTGGACGTGAGCCAC
GAAGACCCTGAGGTCAAGTTCAACTGGTATGTGGACGGCGTGGAGGTGCATAATGCAAAGAC
AAAGCCGCGGGAGGAGCAGTACAACAGCACGTACCGTGTGGTCAGCGTCCTCACCGTCCTG
CACCAGGACTGGCTGAATGGCAAGGAGTACAAGTGCAAGGTCTCCAACAAAGCCCTCCCAGC
CCCCATCGAGAAAACCATCTCCAAAGCCAAA
SEQ ID NO: 202 IgG1 CH2 region
PCPAPELLGGPSVFLFPPKPKDTLMISRTPEVTCVVVDVSHEDPEVKFNWYVDGVEVHNAKTKPR
EEQYNSTYRVVSVLTVLHQDWLNGKEYKCKVSNKALPAPIEKTISKAK
SEQ ID NO: 203 IgG1 CH3 region
GGGCAGCCCCGAGAACCACAGGTGTACACCCTGCCCCCATCCCGGGATGAGCTGACCAAGA
ACCAGGTCAGCCTGACCTGCCTGGTCAAAGGCTTCTATCCCAGCGACATCGCCGTGGAGTG
GGAGAGCAATGGGCAACCGGAGAACAACTACAAGACCACGCCTCCCGTGCTGGACTCCGAC
GGCTCCTTCTTCCTCTACAGCAAGCTCACCGTGGACAAGAGCAGGTGGCAGCAGGGGAACG
TCTTCTCATGCTCCGTGATGCATGAGGCTCTGCACAACCACTACACGCAGAAGAGCCTCTCC
CTGTCTCCGGGTAAA
SEQ ID NO: 204 IgG1 CH3 region
GQPREPQVYTLPPSRDELTKNQVSLTCLVKGFYPSDIAVEWESNGQPENNYKTTPPVLDSDGSFF
LYSKLTVDKSRWQQGNVFSCSVMHEALHNHYTQKSLSLSPGK
SEQ ID NO: 205 Linker
AAAGATCCCAAA
SEQ ID NO: 206 Linker
KDPK
SEQ ID NO: 207 CD28 transmembrane region
TTTTGGGTGCTGGTGGTGGTTGGTGGAGTCCTGGCTTGCTATAGCTTGCTAGTAACAGTGGC
CTTTATTATT
SEQ ID NO: 208 CD28 transmembrane region
FWVLVVVGGVLACYSLLVTVAFII
SEQ ID NO: 209 Linker
gccggc
SEQ ID NO: 210 Linker
AG
SEQ ID NO: 211 CD3 zeta
AGAGTGAAGTTCAGCAGGAGCGCAGACGCCCCCGCGTACCAGCAGGGCCAGAACCAGCTCT
ATAACGAGCTCAATCTAGGACGAAGAGAGGAGTACGATGTTTTGGACAAGAGACGTGGCCGG
GACCCTGAGATGGGGGGAAAGCCGAGAAGGAAGAACCCTCAGGAAGGCCTGTACAATGAAC
TGCAGAAAGATAAGATGGCGGAGGCCTACAGTGAGATTGGGATGAAAGGCGAGCGCCGGAG
GGGCAAGGGGCACGATGGCCTTTACCAGGGTCTCAGTACAGCCACCAAGGACACCTACGAC
GCCCTTCACATGCAGGCCCTGCCCCCTCGC
SEQ ID NO: 212 CD3 zeta
RVKFSRSADAPAYQQGQNQLYNELNLGRREEYDVLDKRRGRDPEMGGKPRRKNPQEGLYNEL
QKDKMAEAYSEIGMKGERRRGKGHDGLYQGLSTATKDTYDALHMQALPPR
SEQ ID NO: 213 MyD88
GCCGCTGGGGGCCCAGGCGCCGGATCAGCTGCTCCCGTATCTTCTACTTCTTCTTTGCCGCT
GGCTGCTCTGAACATGCGCGTGAGAAGACGCCTCTCCCTGTTCCTTAACGTTCGCACACAAG
TCGCTGCCGATTGGACCGCCCTTGCCGAAGAAATGGACTTTGAATACCTGGAAATTAGACAA
CTTGAAACACAGGCCGACCCCACTGGCAGACTCCTGGACGCATGGCAGGGAAGACCTGGTG
CAAGCGTTGGACGGCTCCTGGATCTCCTGACAAAACTGGGACGCGACGACGTACTGCTTGAA
CTCGGACCTAGCATTGAAGAAGACTGCCAAAAATATATCCTGAAACAACAACAAGAAGAAGCC
GAAAAACCTCTCCAAGTCGCAGCAGTGGACTCATCAGTACCCCGAACAGCTGAGCTTGCTGG
GATTACTACACTCGACGACCCACTCGGACATATGCCTGAAAGATTCGACGCTTTCATTTGCTA
TTGCCCCTCTGACATA
SEQ ID NO: 214 MyD88
AAGGPGAGSAAPVSSTSSLPLAALNMRVRRRLSLFLNVRTQVAADWTALAEEMDFEYLEIRQLET
QADPTGRLLDAWQGRPGASVGRLLDLLTKLGRDDVLLELGPSIEEDCQKYILKQQQEEAEKPLQV
AAVDSSVPRTAELAGITTLDDPLGHMPERFDAFICYCPSDI
SEQ ID NO: 215 CD40
AAGAAAGTTGCAAAGAAACCCACAAATAAAGCCCCACACCCTAAACAGGAACCCCAAGAAATC
AATTTCCCAGATGATCTCCCTGGATCTAATACTGCCGCCCCGGTCCAAGAAACCCTGCATGGT
TGCCAGCCTGTCACCCAAGAGGACGGAAAAGAATCACGGATTAGCGTACAAGAGAGACAATAG
SEQ ID NO: 216 CD40
KKVAKKPTNKAPHPKQEPQEINFPDDLPGSNTAAPVQETLHGCQPVTQEDGKESRISVQERQ*
Sequences for pBPO425
pBP0521-SFG-CD19scFv.CH2CH3.CD28tm.MyD88/CD40.zeta sequence
SEQ ID NO: 217 Signal peptide
ATGGAGTTTGGACTTTCTTGGTTGTTTTTGGTGGCAATTCTGAAGGGTGTCCAGTGTAGCAGG
SEQID NO: 218 Signal peptide
MEFGLSWLFLVAILKGVQCSR
SEQ ID NO: 219 FMC63 variable light chain
GACATCCAGAT
GACACAGACTACATCCTCCCTGTCTGCCTCTCTGGGAGACAGAGTCACCATCAGTTGCAGGG
CAAGTCAGGACATTAGTAAATATTTAAATTGGTATCAGCAGAAACCAGATGGAACTGTTAAACT
CCTGATCTACCATACATCAAGATTACACTCAGGAGTCCCATCAAGGTTCAGTGGCAGTGGGTC
TGGAACAGATTATTCTCTCACCATTAGCAACCTGGAGCAAGAAGATATTGCCACTTACTTTTGC
CAACAGGGTAATACGCTTCCGTACACGTTCGGAGGGGGGACTAAGTTGGAAATAACA
SEQ ID NO: 220 FMC63 variable light chain
DIQMTQTTSSLSASLGDRVTISCRASQDISKYLNWYQQKPDGTVKLLIYHTSRLHSGVPSRFSGSG
SGTDYSLTISNLEQEDIATYFCQQGNTLPYTFGGGTKLEIT
SEQ ID NO: 221 Flexible linker
GGCGGAGGAAGCGGAGGTGGGGGC
SEQ ID NO: 222 Flexible linker
GGGSGGGG
SEQ ID NO: 223 FMC63 variable heavy chain
GAGGTGAAACTGCAGGAGTCAGGACCTGGCCTGGTGGCGCCCTCACAGAGCCTGTCCGTCA
CATGCACTGTCTCAGGGGTCTCATTACCCGACTATGGTGTAAGCTGGATTCGCCAGCCTCCA
CGAAAGGGTCTGGAGTGGCTGGGAGTAATATGGGGTAGTGAAACCACATACTATAATTCAGC
TCTCAAATCCAGACTGACCATCATCAAGGACAACTCCAAGAGCCAAGTTTTCTTAAAAATGAAC
AGTCTGCAAACTGATGACACAGCCATTTACTACTGTGCCAAACATTATTACTACGGTGGTAGC
TATGCTATGGACTACTGGGGTCAAGGAACCTCAGTCACCGTCTCCTCA
SEQ ID NO: 224 FMC63 variable heavy chain
EVKLQESGPGLVAPSQSLSVTCTVSGVSLPDYGVSWIRQPPRKGLEWLGVIWGSETTYYNSALK
SRLTIIKDNSKSQVFLKMNSLQTDDTAIYYCAKHYYYGGSYAMDYWGQGTSVTVSS
SEQ ID NO: 225 Linker
GGGGATCCCGCC
SEQ ID NO: 226 Linker
GDPA
SEQ ID NO: 227 IgG1 hinge
GAGCCCAAATCTCCTGACAAAACTCACACATGCCCA
SEQ ID NO: 228 IgG1 hinge
EPKSPDKTHTCP
SEQ ID NO: 229 IgG1 CH2 region
CCGTGCCCAGCACCTGAACTCCTGGGGGGACCGTCAGTCTTCCTCTTCCCCCCAAAACCCAA
AGACACCCTCATGATCTCCCGGACCCCTGAGGTCACATGCGTGGTGGTGGACGTGAGCCAC
GAAGACCCTGAGGTCAAGTTCAACTGGTATGTGGACGGCGTGGAGGTGCATAATGCAAAGAC
AAAGCCGCGGGAGGAGCAGTACAACAGCACGTACCGTGTGGTCAGCGTCCTCACCGTCCTG
CACCAGGACTGGCTGAATGGCAAGGAGTACAAGTGCAAGGTCTCCAACAAAGCCCTCCCAGC
CCCCATCGAGAAAACCATCTCCAAAGCCAAA
SEQ ID NO: 230 IgG1 CH2 region
PCPAPELLGGPSVFLFPPKPKDTLMISRTPEVTCVVVDVSHEDPEVKFNWYVDGVEVHNAKTKPR
EEQYNSTYRVVSVLTVLHQDWLNGKEYKCKVSNKALPAPIEKTISKAK
SEQ ID NO: 231 IgG1 CH3 region
GGGCAGCCCCGAGAACCACAGGTGTACACCCTGCCCCCATCCCGGGATGAGCTGACCAAGA
ACCAGGTCAGCCTGACCTGCCTGGTCAAAGGCTTCTATCCCAGCGACATCGCCGTGGAGTG
GGAGAGCAATGGGCAACCGGAGAACAACTACAAGACCACGCCTCCCGTGCTGGACTCCGAC
GGCTCCTTCTTCCTCTACAGCAAGCTCACCGTGGACAAGAGCAGGTGGCAGCAGGGGAACG
TCTTCTCATGCTCCGTGATGCATGAGGCTCTGCACAACCACTACACGCAGAAGAGCCTCTCC
CTGTCTCCGGGTAAA
SEQ ID NO: 232 IgG1 CH3 region
GQPREPQVYTLPPSRDELTKNQVSLTCLVKGFYPSDIAVEWESNGQPENNYKTTPPVLDSDGSFF
LYSKLTVDKSRWQQGNVFSCSVMHEALHNHYTQKSLSLSPGK
SEQ ID NO: 233 Linker
AAAGATCCCAAA
SEQ ID NO: 234 Linker
KDPK
SEQ ID NO: 235 CD28 transmembrane region
TTTTGGGTGCTGGTGGTGGTTGGTGGAGTCCTGGCTTGCTATAGCTTGCTAGTAACAGTGGC
CTTTATTATT
SEQ ID NO: 236 CD28 transmembrane region
FWVLVVVGGVLACYSLLVTVAFII
SEQ ID NO: 237 Linker
Ctcgag
SEQ ID NO: 238 Linker
LE
SEQ ID NO: 239 MyD88
ATGGCCGCTGGGGGCCCAGGCGCCGGATCAGCTGCTCCCGTATCTTCTACTTCTTCTTTGCC
GCTGGCTGCTCTGAACATGCGCGTGAGAAGACGCCTCTCCCTGTTCCTTAACGTTCGCACAC
AAGTCGCTGCCGATTGGACCGCCCTTGCCGAAGAAATGGACTTTGAATACCTGGAAATTAGA
CAACTTGAAACACAGGCCGACCCCACTGGCAGACTCCTGGACGCATGGCAGGGAAGACCTG
GTGCAAGCGTTGGACGGCTCCTGGATCTCCTGACAAAACTGGGACGCGACGACGTACTGCTT
GAACTCGGACCTAGCATTGAAGAAGACTGCCAAAAATATATCCTGAAACAACAACAAGAAGAA
GCCGAAAAACCTCTCCAAGTCGCAGCAGTGGACTCATCAGTACCCCGAACAGCTGAGCTTGC
TGGGATTACTACACTCGACGACCCACTCGGACATATGCCTGAAAGATTCGACGCTTTCATTTG
CTATTGCCCCTCTGACATA
SEQ ID NO: 240 MyD88
MAAGGPGAGSAAPVSSTSSLPLAALNMRVRRRLSLFLNVRTQVAADWTALAEEMDFEYLEIRQLE
TQADPTGRLLDAWQGRPGASVGRLLDLLTKLGRDDVLLELGPSIEEDCQKYILKQQQEEAEKPLQ
VAAVDSSVPRTAELAGITTLDDPLGHMPERFDAFICYCPSDI
SEQ ID NO: 241 CD40
AAGAAAGTTGCAAAGAAACCCACAAATAAAGCCCCACACCCTAAACAGGAACCCCAAGAAATC
AATTTCCCAGATGATCTCCCTGGATCTAATACTGCCGCCCCGGTCCAAGAAACCCTGCATGGT
TGCCAGCCTGTCACCCAAGAGGACGGAAAAGAATCACGGATTAGCGTACAAGAGAGACAA
SEQ ID NO: 242 CD40
KKVAKKPTNKAPHPKQEPQEINFPDDLPGSNTAAPVQETLHGCQPVTQEDGKESRISVQERQ
SEQ ID NO: 243 Linker
gcggccgcagTCGAG
SEQ ID NO: 244 Linker
AAAVE
SEQ ID NO: 245 CD3 zeta chain
AGAGTGAAGTTCAGCAGGAGCGCAGACGCCCCCGCGTACCAGCAGGGCCAGAACCAGCTCT
ATAACGAGCTCAATCTAGGACGAAGAGAGGAGTACGATGTTTTGGACAAGAGACGTGGCCGG
GACCCTGAGATGGGGGGAAAGCCGAGAAGGAAGAACCCTCAGGAAGGCCTGTACAATGAAC
TGCAGAAAGATAAGATGGCGGAGGCCTACAGTGAGATTGGGATGAAAGGCGAGCGCCGGAG
GGGCAAGGGGCACGATGGCCTTTACCAGGGTCTCAGTACAGCCACCAAGGACACCTACGAC
GCCCTTCACATGCAGGCCCTGCCCCCTCGCTAA
SEQ ID NO: 246 CD3 zeta chain
RVKFSRSADAPAYQQGQNQLYNELNLGRREEYDVLDKRRGRDPEMGGKPRRKNPQEGLYNEL
QKDKMAEAYSEIGMKGERRRGKGHDGLYQGLSTATKDTYDALHMQALPPR*
Sequences for SFG-Myr.MC-2A-CD19.scfv.CD34e.CD8stm.zeta
SFG-Myr.MC.2A.CD19scFv.CD34e.CD8stm.zeta sequence
SEQ ID NO: 247 Myristolation
atggggagtagcaagagcaagcctaaggaccccagccagcgc
SEQ ID NO: 248 Myristolation
MGSSKSKPKDPSQR
SEQ ID NO: 249 Linker
ctcgac
SEQ ID NO: 250 Linker
LD
SEQ ID NO: 251 MyD88
atggctgcaggaggtcccggcgcggggtctgcggccccggtctcctccacatcctcccttcccctggctgctctcaacatgcgagtgcggc
gccgcctgtctctgttcttgaacgtgcggacacaggtggcggccgactggaccgcgctggcggaggagatggactttgagtacttggaga
tccggcaactggagacacaagcggaccccactggcaggctgctggacgcctggcagggacgccctggcgcctctgtaggccgactgc
tcgatctgcttaccaagctgggccgcgacgacgtgctgctggagctgggacccagcattgaggaggattgccaaaagtatatcttgaagc
agcagcaggaggaggctgagaagcctttacaggtggccgctgtagacagcagtgtcccacggacagcagagctggcgggcatcacc
acacttgatgaccccctggggcatatgcctgagcgtttcgatgccttcatctgctattgccccagcgacatc
SEQ ID NO: 252 MyD88
MAAGGPGAGSAAPVSSTSSLPLAALNMRVRRRLSLFLNVRTQVAADWTALAEEMDFEYLEIRQLE
TQADPTGRLLDAWQGRPGASVGRLLDLLTKLGRDDVLLELGPSIEEDCQKYILKQQQEEAEKPLQ
VAAVDSSVPRTAELAGITTLDDPLGHMPERFDAFICYCPSDI
SEQ ID NO: 253 Linker
gtcgag
SEQ ID NO: 254 Linker
VE
SEQ ID NO: 255 CD40
aaaaaggtggccaagaagccaaccaataaggccccccaccccaagcaggagccccaggagatcaattttcccgacgatcttcctggc
tccaacactgctgctccagtgcaggagactttacatggatgccaaccggtcacccaggaggatggcaaagagagtcgcatctcagtgca
ggagagacag
SEQ ID NO: 256 CD40
KKVAKKPTNKAPHPKQEPQEINFPDDLPGSNTAAPVQETLHGCQPVTQEDGKESRISVQERQ
SEQ ID NO: 257 Linker
CCGCGG
SEQ ID NO: 258 Linker
PR
SEQ ID NO: 259 T2A sequence
GAAGGCCGAGGGAGCCTGCTGACATGTGGCGATGTGGAGGAAAACCCAGGACCA
SEQ ID NO: 260 T2A sequence
EGRGSLLTCGDVEENPGP
SEQ ID NO: 261 Signal peptide
ATGGAGTTTGGACTTTCTTGGTTGTTTTTGGTGGCAATTCTGAAGGGTGTCCAGTGTAGCAGG
SEQ ID NO: 262 Signal peptide
MEFGLSWLFLVAILKGVQCSR
SEQ ID NO: 263 FMC63 variable light chain
GACATCCAGATGACACAGACTACATCCTCCCTGTCTGCCTCTCTGGGAGACAGAGTCACCAT
CAGTTGCAGGGCAAGTCAGGACATTAGTAAATATTTAAATTGGTATCAGCAGAAACCAGATGG
AACTGTTAAACTCCTGATCTACCATACATCAAGATTACACTCAGGAGTCCCATCAAGGTTCAGT
GGCAGTGGGTCTGGAACAGATTATTCTCTCACCATTAGCAACCTGGAGCAAGAAGATATTGCC
ACTTACTTTTGCCAACAGGGTAATACGCTTCCGTACACGTTCGGAGGGGGGACTAAGTTGGA
AATAACA
SEQ ID NO: 264 FMC63 variable light chain
DIQMTQTTSSLSASLGDRVTISCRASQDISKYLNWYQQKPDGTVKLLIYHTSRLHSGVPSRFSGSG
SGTDYSLTISNLEQEDIATYFCQQGNTLPYTFGGGTKLEIT
SEQ ID NO: 265 Flexible linker
GGCGGAGGAAGCGGAGGTGGGGGC
SEQ ID NO: 266 Flexible linker
GGGSGGGG
SEQ ID NO: 267 FMC63 variable heavy chain
GAGGTGAAACTGCAGGAGTCAGGACCTGGCCTGGTGGCGCCCTCACAGAGCCTGTCCGTCA
CATGCACTGTCTCAGGGGTCTCATTACCCGACTATGGTGTAAGCTGGATTCGCCAGCCTCCA
CGAAAGGGTCTGGAGTGGCTGGGAGTAATATGGGGTAGTGAAACCACATACTATAATTCAGC
TCTCAAATCCAGACTGACCATCATCAAGGACAACTCCAAGAGCCAAGTTTTCTTAAAAATGAAC
AGTCTGCAAACTGATGACACAGCCATTTACTACTGTGCCAAACATTATTACTACGGTGGTAGC
TATGCTATGGACTACTGGGGTCAAGGAACCTCAGTCACCGTCTCCTCA
SEQ ID NO: 268 FMC63 variable heavy chain
EVKLQESGPGLVAPSQSLSVTCTVSGVSLPDYGVSWIRQPPRKGLEWLGVIWGSETTYYNSALK
SRLTIIKDNSKSQVFLKMNSLQTDDTAIYYCAKHYYYGGSYAMDYWGQGTSVTVSS
SEQ ID NO: 269 Linker
GGATCC
SEQ ID NO: 270 Linker
GS
SEQ ID NO: 271 CD34 minimal epitope
GAACTTCCTACTCAGGGGACTTTCTCAAACGTTAGCACAAACGTAAGT
SEQ ID NO: 272 CD34 minimal epitope
ELPTQGTFSNVSTNVS
SEQ ID NO: 273 CD8 alpha stalk domain
CCCGCCCCAAGACCCCCCACACCTGCGCCGACCATTGCTTCTCAACCCCTGAGTTTGAGACC
CGAGGCCTGCCGGCCAGCTGCCGGCGGGGCCGTGCATACAAGAGGACTCGATTTCGCTTGC
GAC
SEQ ID NO: 274 CD8 alpha stalk domain
PAPRPPTPAPTIASQPLSLRPEACRPAAGGAVHTRGLDFACD
SEQ ID NO: 275 CD8 alpha transmembrane domain
ATCTATATCTGGGCACCTCTCGCTGGCACCTGTGGAGTCCTTCTGCTCAGCCTGGTTATTACT
CTGTACTGTAATCACCGGAATCGCCGCCGCGTTTGTAAGTGTCCCAGG
SEQ ID NO: 276 CD8 alpha transmembrane domain
IYIWAPLAGTCGVLLLSLVITLYCNHRNRRRVCKCPR
SEQ ID NO: 277 Linker
GTCGAC
SEQ ID NO: 278 Linker
VD
SEQ ID NO: 279 CD3 zeta
AGAGTGAAGTTCAGCAGGAGCGCAGACGCCCCCGCGTACCAGCAGGGCCAGAACCAGCTCT
ATAACGAGCTCAATCTAGGACGAAGAGAGGAGTACGATGTTTTGGACAAGAGACGTGGCCGG
GACCCTGAGATGGGGGGAAAGCCGAGAAGGAAGAACCCTCAGGAAGGCCTGTACAATGAAC
TGCAGAAAGATAAGATGGCGGAGGCCTACAGTGAGATTGGGATGAAAGGCGAGCGCCGGAG
GGGCAAGGGGCACGATGGCCTTTACCAGGGTCTCAGTACAGCCACCAAGGACACCTACGAC
GCCCTTCACATGCAGGCCCTGCCCCCTCGC
SEQ ID NO: 280 CD3 zeta
RVKFSRSADAPAYQQGQNQLYNELNLGRREEYDVLDKRRGRDPEMGGKPRRKNPQEGLYNEL
QKDKMAEAYSEIGMKGERRRGKGHDGLYQGLSTATKDTYDALHMQALPPR
SEQ ID NO: 281 (MyD88 nucleotide sequence)
atggctgcaggaggtcccggcgcggggtctgcggccccggtctcctccacatcctcccttcccctggctgctctcaacatgcgagtgcggc
gccgcctgtctctgttcttgaacgtgcggacacaggtggcggccgactggaccgcgctggcggaggagatggactttgagtacttggaga
tccggcaactggagacacaagcggaccccactggcaggctgctggacgcctggcagggacgccctggcgcctctgtaggccgactgc
tcgagctgcttaccaagctgggccgcgacgacgtgctgctggagctgggacccagcattgaggaggattgccaaaagtatatcttgaag
cagcagcaggaggaggctgagaagcctttacaggtggccgctgtagacagcagtgtcccacggacagcagagctggcgggcatcac
cacacttgatgaccccctggggcatatgcctgagcgtttcgatgccttcatctgctattgccccagcgacatccagtttgtgcaggagatgatc
cggcaactggaacagacaaactatcgactgaagttgtgtgtgtctgaccgcgatgtcctgcctggcacctgtgtctggtctattgctagtgag
ctcatcgaaaagaggtgccgccggatggtggtggttgtctctgatgattacctgcagagcaaggaatgtgacttccagaccaaatttgcact
cagcctctctccaggtgcccatcagaagcgactgatccccatcaagtacaaggcaatgaagaaagagttccccagcatcctgaggttcat
cactgtctgcgactacaccaacccctgcaccaaatcttggttctggactcgccttgccaaggccttgtccctgccc
SEQ ID NO: 282 (MyD88 amino acid sequence)
M A A G G P G A G S A A P V S S T S S L P L A A L N M R V R R R L S L F L N V R T Q V A A
D W T A L A E E M D F E Y L E I R Q L E T Q A D P T G R L L D A W Q G R P G A S V G R L L
E L L T K L G R D D V L L E L G P S I E E D C Q K Y I L K Q Q Q E E A E K P L Q V A A V D S S
V P R T A E L A G I T T L D D P L G H M P E R F D A F I C Y C P S D I Q F V Q E M I R Q L E Q
T N Y R L K L C V S D R D V L P G T C V W S I A S E L I E K R C R R M V V V V S D D Y L Q S
K E C D F Q T K F A L S L S P G A H Q K R L I P I K Y K A M K K E F P S I L R F I T V C D Y T N
P C T K S W F W T R L A K A L S L P

### Example 17: Development of Improved Therapeutic Cell Dimmer Switch

[0747] Therapy using autologous T cells expressing chimeric antigen receptors (CARs) directed toward tumor-associated antigens (TAAs) has had a transformational effect on the treatment of certain types of leukemias (“liquid tumors”) and lymphomas with objective response (OR) rates approaching 90%. Despite their great clinical promise and the predictable accompanying enthusiasm, this success is tempered by the observed high level of on-target, off-tumor adverse events, typical of a cytokine release syndrome (CRS). To maintain the benefit of these revolutionary treatments while minimizing the risk, a chimeric caspase polypeptide-based suicide gene system has been developed, which is based on synthetic ligand-mediated dimerization of a modified Caspase-9 protein, fused to a ligand binding domain, called FKBP12v36. In the presence of the FKBP12v36-binding to the small molecule dimerizer, rimiducid (AP1903), Caspase-9 is activated, leading to rapid apoptosis of target cells. Addition of reduced levels of rimiducid can lead to a tempered rate of killing, allowing the amount of T cell elimination to be regulated from almost nothing to almost full elimination of chimeric caspase-modified T cells. To maximize the utility of this “dimmer” switch, the slope of the dose-response curve should be as gradual as possible; otherwise, administration of the correct dose is challenging. With the current, first generation, clinical iCaspase-9 construct, a dose response curve covering about 1.5 to 2 logs has been observed.

[0748] To improve on the therapeutic cell dimmer function, a second level of control may be added to Caspase-9 aggregation, separating rapamycin-driven low levels of aggregation from rimiducid-driven high levels of dimerization. In the first level of control, chimeric caspase polypeptides are recruited by rapamycin/sirolimus (or non-immunosuppressant analog) to a chimeric antigen receptor (CAR), which is modified to contain one or more copies of the 89-amino acid FKBP12-Rapamycin-Binding (FRB) domain (encoded within mTOR) on its carboxy terminus (FIG. 3, left panel). Relative to rimiducid-driven homodimerization of iCaspase-9, it is predicted that the level of Caspase-9 oligomerization would be reduced, both due to the relative affinities of rapamycin-bound FKBP12v36 to FRB (K_{d}˜4 nM) vs rimiducid-bound FKBP12v36 (˜0.1 nM) and due to the “staggered” geometry of the crosslinked proteins. An additional level of “fine-tuning” can be provided at the CAR docking site by changing the number of FRB domains fused to each CAR. Meanwhile, target-dependent specificity will be provided by normal target-driven CAR clustering, which should, in turn, be translated to chimeric caspase polypeptide clustering in the presence of rapamycin. When a maximum level of cell elimination is required, rimiducid can also be administered under the current protocol (i.e., currently 0.4 mg/kg in a 2-hour infusion (FIG. 3, right panel).

### Methods:

[0749] Vectors for rapalog-regulated chimeric caspase polypeptide: The Schreiber lab initially identified the minimal FKBP12-rapamycin binding (FRB) domain from mTOR/FRAP (residues 2025-2114), determining it to have a rapamycin dissociation constant (Kd) about 4 nM (Chen J et al (95) PNAS 92, 4947-51). Subsequent studies identified orthogonal mutants of FRB, such as FRBI (L2098) that bind with relatively high affinity to non-immunosuppressant “bumped” rapamycin analogs (“rapalogs”) (Liberles S D (97) PNAS 94, 7825-30; Bayle J H (06) Chem & Biol 13, 99-107). In order to develop modified MC-CARs that can recruit iC9, the carboxy terminal CD3 zeta domain (from pBP0526) and pBP0545, FIG. 7) are fused to 1 or 2 tandem FRB_{L} domains using a commercially synthesized Sall-Mlul fragment that contains MyD88, CD40, and CD3ζ domains to produce vectors pBP0612 and pBP0611, respectively (FIGS. 4 and 5) and Tables 7 and 8. The approach should also be applicable to any CAR construct, including standard, “non-MyD88/CD40” constructs, such as those that include CD28, OX40, and/or 4-1BB, and CD3zeta.

### Results:

[0750] As a proof of principal, two tandem FRB, domains were fused to either a 1^{st} generation Her2-CAR or to a 1^{st} generation CD19-CAR co-expressing inducible Caspase-9. 293 cells were transiently transfected with a constitutive reporter plasmid, SRα-SEAP, along with normalized levels of expression plasmids encoding Her2-CAR-FRB_{I}2, iCaspase-9, Her2-CAR-FRB_{I}2+iCasp9, iC9-CAR(19).FRB_{I}2 (coexpressing both CD19-CAR-FRB_{I}2 and iCaspase9), or control vector. After 24 hours, cells were washed and distributed into duplicate wells with half-log dilutions of rapamycin or rimiducid. After overnight incubation with drugs, SEAP activity was determined. Interestingly, rapamycin addition led to a broad decrement of SEAP activity up to about a 50% decrease (FIG. 6). This dose-dependent decrease required the presence of both the FRB-tagged CAR and the FKBP-tagged Caspase-9. In contrast, AP1903 decreased SEAP activity to about 20% normal levels at much lower levels of drug, comparable to previous experience. It is likely possible to reduce cell viability with rapamycin and switch to rimiducid for more efficient killing in vivo if necessary. Moreover, on- or off-target-mediated CAR clustering should increase the sensitivity of killing primarily at the site of scFv engagement.

### Additional Permutations of the Hetero-Switch:

[0751] Although inducible Caspase-9 has been found to be the fastest and most CID-sensitive suicide gene tested among a large cohort of inducible signaling molecules, many other proteins or protein domains that lead to apoptosis (or related necroptosis, triggering inflammation and necrosis as the means of cell death) could be adapted to homo- or heterodimer-based killing using this approach.

[0752] A partial list of proteins that could be activated by rapamycin (or rapalog)-mediated membrane recruitment includes:

Other Caspases (i.e., Caspases 1 to 14, which have been identified in mammals)
Other Caspase-associated adapter molecules, such as FADD (DED), APAF1 (CARD), CRADD/RAIDD (CARD), and ASC (CARD) that function as natural caspase dimerizers (dimerization domains in parentheses).

[0753] Pro-apoptotic Bcl-2 Family members, such as Bax and Bak, which can cause mitochondrial depolarization (or mislocalization of anti-apoptotic family members, like Bcl-xL or Bcl-2). RIPK3 or the RIPK1-RHIM domain that can trigger a related form of pro-inflammatory cell death, called necroptosis, due to MLKL-mediated membrane lysis.

[0754] Due to its target-dependent level of aggregation, CAR receptors should provide ideal docking sites for rapamycin-mediated recruitment of pro-apoptotic molecules. Nevertheless, many examples exist of multivalent docking site containing FRB domains that could potentially provide rapalog-mediated cell death in the presence of co-expressed chimeric inducible caspase-like molecules.

TABLE 7
iCasp9-2A-ΔCD19-Q-CD28stm-MCz-FRBI2

| | | SEQ ID | | SEQ ID |
|---|---|---|---|---|
| Fragment | Nucleotide | NO: | Polypeptide | NO: |
| FKBP12v36 | ATGGGAGTGCAGGTGGAGACTATTAG | 393 | MGVQVETISPGDGRTFPKRGQTCVVH | 394 |
| | CCCCGGAGATGGCAGAACATTCCCCA | | YTGMLEDGKKVDSSRDRNKPFKFMLG | |
| | AAAGAGGACAGACTTGCGTCGTGCAT | | KQEVIRGWEEGVAQMSVGQRAKLTISP | |
| | TATACTGGAATGCTGGAAGACGGCAA | | DYAYGATGHPGIIPPHATLVFDVELLKLE | |
| | GAAGGTGGACAGCAGCCGGGACCGA | | | |
| | AACAAGCCCTTCAAGTTCATGCTGGG | | | |
| | GAAGCAGGAAGTGATCCGGGGCTGG | | | |
| | GAGGAAGGAGTCGCACAGATGTCAGT | | | |
| | GGGACAGAGGGCCAAACTGACTATTA | | | |
| | GCCCAGACTACGCTTATGGAGCAACC | | | |
| | GGCCACCCCGGGATCATTCCCCCTCA | | | |
| | TGCTACACTGGTCTTCGATGTGGAGC | | | |
| | TGCTGAAGCTGGAA | | | |
| Linker | AGCGGAGGAGGATCCGGA | 395 | SGGGSG | 396 |
| ΔCaspase-9 | GTGGACGGGTTTGGAGATGTGGGAG | 397 | SEQ ID NO: 300 | 300 |
| | CCCTGGAATCCCTGCGGGGCAATGC | | VDGFGDVGALESLRGNADLAYILSMEP | |
| | CGATCTGGCTTACATCCTGTCTATGG | | CGHCLIINNVNFCRESGLRTRTGSNIDC | |
| | AGCCTTGCGGCCACTGTCTGATCATT | | EKLRRRFSSLHFMVEVKGDLTAKKMVL | |
| | AACAATGTGAACTTCTGCAGAGAGAG | | ALLELARQDHGALDCCVVVILSHGCQA | |
| | CGGGCTGCGGACCAGAACAGGATCC | | SHLQFPGAVYGTDGCPVSVEKIVNIFNG | |
| | AATATTGACTGTGAAAAGCTGCGGAG | | TSCPSLGGKPKLFFIQACGGEQKDHGF | |
| | AAGGTTCTCTAGTCTGCACTTTATGGT | | EVASTSPEDESPGSNPEPDATPFQEGL | |
| | CGAGGTGAAAGGCGATCTGACCGCTA | | RTFDQLDAISSLPTPSDIFVSYSTFPGFV | |
| | AGAAAATGGTGCTGGCCCTGCTGGAA | | SWRDPKSGSWYVETLDDIFEQWAHSE | |
| | CTGGCTCGGCAGGACCATGGGGCAC | | DLQSLLLRVANAVSVKGIYKQMPGCFN | |
| | TGGATTGCTGCGTGGTCGTGATCCTG | | FLRKKLFFKTSASRA | |
| | AGTCACGGCTGCCAGGCTTCACATCT | | | |
| | GCAGTTCCCTGGGGCAGTCTATGGAA | | | |
| | CTGACGGCTGTCCAGTCAGCGTGGA | | | |
| | GAAGATCGTGAACATCTTCAACGGCA | | | |
| | CCTCTTGCCCAAGTCTGGGCGGGAA | | | |
| | GCCCAAACTGTTCTTTATTCAGGCCT | | | |
| | GTGGAGGCGAGCAGAAAGATCACGG | | | |
| | CTTCGAAGTGGCTAGCACCTCCCCCG | | | |
| | AGGACGAATCACCTGGAAGCAACCCT | | | |
| | GAGCCAGATGCAACCCCCTTCCAGGA | | | |
| | AGGCCTGAGGACATTTGACCAGCTGG | | | |
| | ATGCCATCTCAAGCCTGCCCACACCT | | | |
| | TCTGACATTTTCGTCTCTTACAGTACT | | | |
| | TTCCCTGGATTTGTGAGCTGGCGCGA | | | |
| | TCCAAAGTCAGGCAGCTGGTACGTGG | | | |
| | AGACACTGGACGATATCTTTGAGCAG | | | |
| | TGGGCCCATTCTGAAGACCTGCAGAG | | | |
| | TCTGCTGCTGCGAGTGGCCAATGCTG | | | |
| | TCTCTGTGAAGGGGATCTACAAACAG | | | |
| | ATGCCAGGATGCTTCAACTTTCTGAG | | | |
| | AAAGAAACTGTTCTTTAAGACCTCCGC | | | |
| | ATCTAGGGCC | | | |
| Linker | CCGCGG | 398 | PR | 399 |
| T2A | GAAGGCCGAGGGAGCCTGCTGACAT | 400 | EGRGSLLTCGDVEENPGP | 401 |
| | GTGGCGATGTGGAGGAAAACCCAGG | | | |
| | ACCA | | | |
| Linker (NcoI) | Ccatgg | 402 | PW | 403 |
| Sig Peptide | ATGGAGTTTGGACTTTCTTGGTTGTTT | 404 | MEFGLSWLFLVAILKGVQCSR | 405 |
| | TTGGTGGCAATTCTGAAGGGTGTCCA | | | |
| | GTGTAGCAGG | | | |
| FMC63-VL | GACATCCAGATGACACAGACTACATC | 406 | DIQMTQTTSSLSASLGDRVTISCRASQD | 407 |
| | CTCCCTGTCTGCCTCTCTGGGAGACA | | ISKYLNWYQQKPDGTVKLLIYHTSRLHS | |
| | GAGTCACCATCAGTTGCAGGGCAAGT | | GVPSRFSGSGSGTDYSLTISNLEQEDIA | |
| | CAGGACATTAGTAAATATTTAAATTGG | | TYFCQQGNTLPYTFGGGTKLEIT | |
| | TATCAGCAGAAACCAGATGGAACTGT | | | |
| | TAAACTCCTGATCTACCATACATCAAG | | | |
| | ATTACACTCAGGAGTCCCATCAAGGT | | | |
| | TCAGTGGCAGTGGGTCTGGAACAGAT | | | |
| | TATTCTCTCACCATTAGCAACCTGGAG | | | |
| | CAAGAAGATATTGCCACTTACTTTTGC | | | |
| | CAACAGGGTAATACGCTTCCGTACAC | | | |
| | GTTCGGAGGGGGGACTAAGTTGGAA | | | |
| | ATAACA | | | |
| Flex-linker | GGCGGAGGAAGCGGAGGTGGGGGC | 408 | GGGSGGGG | 409 |
| FMC63-VH | GAGGTGAAACTGCAGGAGTCAGGAC | 410 | EVKLQESGPGLVAPSQSLSVTCTVSGV | 411 |
| | CTGGCCTGGTGGCGCCCTCACAGAG | | SLPDYGVSWIRQPPRKGLEWLGVIWGS | |
| | CCTGTCCGTCACATGCACTGTCTCAG | | ETTYYNSALKSRLTIIKDNSKSQVFLKM | |
| | GGGTCTCATTACCCGACTATGGTGTA | | NSLQTDDTAIYYCAKHYYYGGSYAMDY | |
| | AGCTGGATTCGCCAGCCTCCACGAAA | | WGQGTSVTVSS | |
| | GGGTCTGGAGTGGCTGGGAGTAATAT | | | |
| | GGGGTAGTGAAACCACATACTATAAT | | | |
| | TCAGCTCTCAAATCCAGACTGACCAT | | | |
| | CATCAAGGACAACTCCAAGAGCCAAG | | | |
| | TTTTCTTAAAAATGAACAGTCTGCAAA | | | |
| | CTGATGACACAGCCATTTACTACTGT | | | |
| | GCCAAACATTATTACTACGGTGGTAG | | | |
| | CTATGCTATGGACTACTGGGGTCAAG | | | |
| | GAACCTCAGTCACCGTCTCCTCA | | | |
| Linker(BamHI) | GGATCC | 412 | GS | 413 |
| CD34 | GAACTTCCTACTCAGGGGACTTTCTC | 414 | ELPTQGTFSNVSTNVS | 415 |
| epitope | AAACGTTAGCACAAACGTAAGT | | | |
| CD8a stalk | CCCGCCCCAAGACCCCCCACACCTG | 416 | PAPRPPTPAPTIASQPLSLRPEACRPAA | 417 |
| | CGCCGACCATTGCTTCTCAACCCCTG | | GGAVHTRGLDFACD | |
| | AGTTTGAGACCCGAGGCCTGCCGGC | | | |
| | CAGCTGCCGGCGGGGCCGTGCATAC | | | |
| | AAGAGGACTCGATTTCGCTTGCGAC | | | |
| CD8tm + | ATCTATATCTGGGCACCTCTCGCTGG | 418 | IYIWAPLAGTCGVLLLSLVITLYCNHRNR | 419 |
| stop tf | CACCTGTGGAGTCCTTCTGCTCAGCC | | RRVCKCPR | |
| | TGGTTATTACTCTGTACTGTAATCACC | | | |
| | GGAATCGCCGCCGCGTTTGTAAGTGT | | | |
| | CCCAGG | | | |
| Linker (SalI) | gtcgac | 420 | VD | 421 |
| MyD88 | ATGGCCGCTGGGGGCCCAGGCGCCG | 422 | MAAGGPGAGSAAPVSSTSSLPLAALN | 423 |
| | GATCAGCTGCTCCCGTATCTTCTACTT | | MRVRRRLSLFLNVRTQVAADWTALAEE | |
| | CTTCTTTGCCGCTGGCTGCTCTGAAC | | MDFEYLEIRQLETQADPTGRLLDAWQG | |
| | ATGCGCGTGAGAAGACGCCTCTCCCT | | RPGASVGRLLDLLTKLGRDDVLLELGP | |
| | GTTCCTTAACGTTCGCACACAAGTCG | | SIEEDCQKYILKQQQEEAEKPLQVAAVD | |
| | CTGCCGATTGGACCGCCCTTGCCGAA | | SSVPRTAELAGITTLDDPLGHMPERFDA | |
| | GAAATGGACTTTGAATACCTGGAAATT | | FICYCPSDI | |
| | AGACAACTTGAAACACAGGCCGACCC | | | |
| | CACTGGCAGACTCCTGGACGCATGG | | | |
| | CAGGGAAGACCTGGTGCAAGCGTTG | | | |
| | GACGGCTCCTGGATCTCCTGACAAAA | | | |
| | CTGGGACGCGACGACGTACTGCTTGA | | | |
| | ACTCGGACCTAGCATTGAAGAAGACT | | | |
| | GCCAAAAATATATCCTGAAACAACAAC | | | |
| | AAGAAGAAGCCGAAAAACCTCTCCAA | | | |
| | GTCGCAGCAGTGGACTCATCAGTACC | | | |
| | CCGAACAGCTGAGCTTGCTGGGATTA | | | |
| | CTACACTCGACGACCCACTCGGACAT | | | |
| | ATGCCTGAAAGATTCGACGCTTTCATT | | | |
| | TGCTATTGCCCCTCTGACATA | | | |
| dCD40 | AAGAAAGTTGCAAAGAAACCCACAAA | 424 | KKVAKKPTNKAPHPKQEPQEINFPDDL | 425 |
| | TAAAGCCCCACACCCTAAACAGGAAC | | PGSNTAAPVQETLHGCQPVTQEDGKE | |
| | CCCAAGAAATCAATTTCCCAGATGATC | | SRISVQERQ | |
| | TCCCTGGATCTAATACTGCCGCCCCG | | | |
| | GTCCAAGAAACCCTGCATGGTTGCCA | | | |
| | GCCTGTCACCCAAGAGGACGGAAAA | | | |
| | GAATCACGGATTAGCGTACAAGAGAG | | | |
| | ACAA | | | |
| CD3z | AGAGTGAAGTTCAGCAGGAGCGCAG | 426 | RVKFSRSADAPAYQQGQNQLYNELNL | 427 |
| | ACGCCCCCGCGTACCAGCAGGGCCA | | GRREEYDVLDKRRGRDPEMGGKPRRK | |
| | GAACCAGCTCTATAACGAGCTCAATC | | NPQEGLYNELQKDKMAEAYSEIGMKGE | |
| | TAGGACGAAGAGAGGAGTACGATGTT | | RRRGKGHDGLYQGLSTATKDTYDALH | |
| | TTGGACAAGAGACGTGGCCGGGACC | | MQALPPR | |
| | CTGAGATGGGGGGAAAGCCGAGAAG | | | |
| | GAAGAACCCTCAGGAAGGCCTGTACA | | | |
| | ATGAACTGCAGAAAGATAAGATGGCG | | | |
| | GAGGCCTACAGTGAGATTGGGATGAA | | | |
| | AGGCGAGCGCCGGAGGGGCAAGGG | | | |
| | GCACGATGGCCTTTACCAGGGTCTCA | | | |
| | GTACAGCCACCAAGGACACCTACGAC | | | |
| | GCCCTTCACATGCAAGCTCTTCCACC | | | |
| | TCGt | | | |
| Linker | Acg | 428 | T | 429 |
| FRBI\hat{ }\hat{ } | TGGCACGAAGGCCTGGAAGAGGCCT | 430 | WHEGLEEASRLYFGERNVKGMFEVLE | 431 |
| | CAAGACTTTACTTTGGTGAACGCAAC | | PLHAMMERGPQTLKETSFNQAYGRDL | |
| | GTTAAAGGCATGTTCGAGGTGCTGGA | | MEAQEWCRKYMKSGNVKDLLQAWDL | |
| | ACCCTTGCATGCAATGATGGAGCGAG | | YYHVFRRISK | |
| | GTCCTCAGACACTCAAAGAGACATCT | | | |
| | TTTAACCAGGCGTATGGACGGGACCT | | | |
| | CATGGAGGCTCAGGAATGGTGCCGC | | | |
| | AAGTACATGAAAAGTGGGAATGTGAA | | | |
| | GGATCTGCTGCAAGCATGGGATCTGT | | | |
| | ATTACCACGTGTTTAGACGGATCAGC | | | |
| | AAA | | | |
| Linker | Cgtacg | 432 | RT | 433 |
| (BsiWI) | | | | |
| FRBI | TGGCATGAAGGGTTGGAAGAAGCTTC | 434 | WHEGLEEASRLYFGERNVKGMFEVLE | 435 |
| | AAGGCTGTACTTCGGAGAGAGGAACG | | PLHAMMERGPQTLKETSFNQAYGRDL | |
| | TGAAGGGCATGTTTGAGGTTCTTGAA | | MEAQEWCRKYMKSGNVKDLLQAWDL | |
| | CCTCTGCACGCCATGATGGAACGGG | | YYHVFRRISK* | |
| | GACCGCAGACACTGAAAGAAACCTCT | | | |
| | TTTAATCAGGCCTACGGCAGAGACCT | | | |
| | GATGGAGGCCCAAGAATGGTGTAGAA | | | |
| | AGTATATGAAATCCGGTAACGTGAAA | | | |
| | GACCTGCTCCAGGCCTGGGACCTTTA | | | |
| | TTACCATGTGTTCAGGCGGATCAGTA | | | |
| | AGTAA | | | |

TABLE 8

| | | SEQ ID | | SEQ ID |
|---|---|---|---|---|
| Fragment | Nucleotide | NO: | Polypeptide | NO: |
| FKBP12v36 | ATGGGAGTGCAGGTGGAGACTATTAG | 436 | MGVQVETISPGDGRTFPKRGQTCVVH | 437 |
| | CCCCGGAGATGGCAGAACATTCCCC | | YTGMLEDGKKVDSSRDRNKPFKFMLG | |
| | AAAAGAGGACAGACTTGCGTCGTGCA | | KQEVIRGWEEGVAQMSVGQRAKLTISP | |
| | TTATACTGGAATGCTGGAAGACGGCA | | DYAYGATGHPGIIPPHATLVFDVELLKLE | |
| | AGAAGGTGGACAGCAGCCGGGACCG | | | |
| | AAACAAGCCCTTCAAGTTCATGCTGG | | | |
| | GGAAGCAGGAAGTGATCCGGGGCTG | | | |
| | GGAGGAAGGAGTCGCACAGATGTCA | | | |
| | GTGGGACAGAGGGCCAAACTGACTA | | | |
| | TTAGCCCAGACTACGCTTATGGAGCA | | | |
| | ACCGGCCACCCCGGGATCATTCCCC | | | |
| | CTCATGCTACACTGGTCTTCGATGTG | | | |
| | GAGCTGCTGAAGCTGGAA | | | |
| Linker | AGCGGAGGAGGATCCGGA | 438 | SGGGSG | 439 |
| dCaspase9 | GTGGACGGGTTTGGAGATGTGGGAG | 440 | VDGFGDVGALESLRGNADLAYILSMEP | 441 |
| | CCCTGGAATCCCTGCGGGGCAATGC | | CGHCLIINNVNFCRESGLRTRTGSNIDC | |
| | CGATCTGGCTTACATCCTGTCTATGG | | EKLRRRFSSLHFMVEVKGDLTAKKMVL | |
| | AGCCTTGCGGCCACTGTCTGATCATT | | ALLELARQDHGALDCCVVVILSHGCQA | |
| | AACAATGTGAACTTCTGCAGAGAGAG | | SHLQFPGAVYGTDGCPVSVEKIVNIFN | |
| | CGGGCTGCGGACCAGAACAGGATCC | | GTSCPSLGGKPKLFFIQACGGEQKDHG | |
| | AATATTGACTGTGAAAAGCTGCGGAG | | FEVASTSPEDESPGSNPEPDATPFQEG | |
| | AAGGTTCTCTAGTCTGCACTTTATGGT | | LRTFDQLDAISSLPTPSDIFVSYSTFPGF | |
| | CGAGGTGAAAGGCGATCTGACCGCT | | VSWRDPKSGSWYVETLDDIFEQWAHS | |
| | AAGAAAATGGTGCTGGCCCTGCTGGA | | EDLQSLLLRVANAVSVKGIYKQMPGCF | |
| | ACTGGCTCGGCAGGACCATGGGGCA | | NFLRKKLFFKTSASRA | |
| | CTGGATTGCTGCGTGGTCGTGATCCT | | | |
| | GAGTCACGGCTGCCAGGCTTCACATC | | | |
| | TGCAGTTCCCTGGGGCAGTCTATGGA | | | |
| | ACTGACGGCTGTCCAGTCAGCGTGG | | | |
| | AGAAGATCGTGAACATCTTCAACGGC | | | |
| | ACCTCTTGCCCAAGTCTGGGCGGGA | | | |
| | AGCCCAAACTGTTCTTTATTCAGGCC | | | |
| | TGTGGAGGCGAGCAGAAAGATCACG | | | |
| | GCTTCGAAGTGGCTAGCACCTCCCCC | | | |
| | GAGGACGAATCACCTGGAAGCAACC | | | |
| | CTGAGCCAGATGCAACCCCCTTCCAG | | | |
| | GAAGGCCTGAGGACATTTGACCAGCT | | | |
| | GGATGCCATCTCAAGCCTGCCCACAC | | | |
| | CTTCTGACATTTTCGTCTCTTACAGTA | | | |
| | CTTTCCCTGGATTTGTGAGCTGGCGC | | | |
| | GATCCAAAGTCAGGCAGCTGGTACGT | | | |
| | GGAGACACTGGACGATATCTTTGAGC | | | |
| | AGTGGGCCCATTCTGAAGACCTGCAG | | | |
| | AGTCTGCTGCTGCGAGTGGCCAATG | | | |
| | CTGTCTCTGTGAAGGGGATCTACAAA | | | |
| | CAGATGCCAGGATGCTTCAACTTTCT | | | |
| | GAGAAAGAAACTGTTCTTTAAGACCT | | | |
| | CCGCATCTAGGGCC | | | |
| Linker | CCGCGG | 442 | PR | 443 |
| (SacII) | | | | |
| T2A | GAGGGCAGGGGAAGTCTTCTAACAT | 444 | EGRGSLLTCGDVEENPGP | 445 |
| | GCGGGGACGTGGAGGAAAATCCCGG | | | |
| | GCCC | | | |
| Linker | GCATGCGCCACC | 446 | ACAT | 447 |
| (NcoI) | | | | |
| Sig Peptide | ATGGAGTTTGGGTTGTCATGGTTGTT | 448 | MEFGLSWLFLVAILKGVQCSR | 449 |
| | TCTCGTCGCTATTCTCAAAGGTG | | | |
| | TACAATGCTCCCGC | | | |
| FRP5-VH | GAAGTCCAATTGCAACAGTCAGGCCC | 450 | EVQLQQSGPELKKPGETVKISCKASGY | 451 |
| | CGAATTGAAAAAGCCCGGCGAAACAG | | PFTNYGMNWVKQAPGQGLKWMGWIN | |
| | TGAAGATATCTTGTAAAGCCTCCGGT | | TSTGESTFADDFKGRFDFSLETSANTA | |
| | TACCCTTTTACGAACTATGGAATGAAC | | YLQINNLKSEDMATYFCARWEVYHGYV | |
| | TGGGTCAAACAAGCCCCTGGACAGG | | PYWGQGTTVTVSS | |
| | GATTGAAGTGGATGGGATGGATCAAT | | | |
| | ACATCAACAGGCGAGTCTACCTTCGC | | | |
| | AGATGATTTCAAAGGTCGCTTTGACTT | | | |
| | CTCACTGGAGACCAGTGCAAATACCG | | | |
| | CCTACCTTCAGATTAACAATCTTAAAA | | | |
| | GCGAGGATATGGCAACCTACTTTTGC | | | |
| | GCAAGATGGGAAGTTTATCACGGGTA | | | |
| | CGTGCCATACTGGGGACAAGGAACG | | | |
| | ACAGTGACAGTTAGTAGC | | | |
| Flex-linker | GGCGGTGGAGGCTCCGGTGGAGGC | 452 | GGGGSGGGGSGGGGS | 453 |
| | GGCTCTGGAGGAGGAGGTTCA | | | |
| FRP5VL | GACATCCAATTGACACAATCACACAA | 454 | DIQLTQSHKFLSTSVGDRVSITCKASQD | 455 |
| | ATTTCTCTCAACTTCTGTAGGAGACA | | VYNAVAWYQQKPGQSPKLLIYSASSRY | |
| | GAGTGAGCATAACCTGCAAAGCATCC | | TGVPSRFTGSGSGPDFTFTISSVQAED | |
| | CAGGACGTGTACAATGCTGTGGCTTG | | LAVYFCQQHFRTPFTFGSGTKLEIKAL | |
| | GTACCAACAGAAGCCTGGACAATCCC | | | |
| | CAAAATTGCTGATTTATTCTGCCTCTA | | | |
| | GTAGGTACACTGGGGTACCTTCTCGG | | | |
| | TTTACGGGCTCTGGGTCCGGACCAG | | | |
| | ATTTCACGTTCACAATCAGTTCCGTTC | | | |
| | AAGCTGAAGACCTCGCTGTTTATTTTT | | | |
| | GCCAGCAGCACTTCCGAACCCCTTTT | | | |
| | ACTTTTGGCTCAGGCACTAAGTTGGA | | | |
| | AATCAAGGCTTTG | | | |
| Linker(NsiI) | Atgcat | 456 | MH | 457 |
| CD34 | GAACTTCCTACTCAGGGGACTTTCTC | 458 | ELPTQGTFSNVSTNVS | 459 |
| epitope | AAACGTTAGCACAAACGTAAGT | | | |
| CD8a stalk | CCCGCCCCAAGACCCCCCACACCTG | 460 | PAPRPPTPAPTIASQPLSLRPEACRPAA | 461 |
| | CGCCGACCATTGCTTCTCAACCCCTG | | GGAVHTRGLDFACD | |
| | AGTTTGAGACCCGAGGCCTGCCGGC | | | |
| | CAGCTGCCGGCGGGGCCGTGCATAC | | | |
| | AAGAGGACTCGATTTCGCTTGCGAC | | | |
| CD8tm + | ATCTATATCTGGGCACCTCTCGCTGG | 462 | IYIWAPLAGTCGVLLLSLVITLYCNHRNR | 463 |
| stop tf | CACCTGTGGAGTCCTTCTGCTCAGCC | | RRVCKCPR | |
| | TGGTTATTACTCTGTACTGTAATCACC | | | |
| | GGAATCGCCGCCGCGTTTGTAAGTGT | | | |
| | CCCAGG | | | |
| Linker (SalI) | gtcgac | 464 | VD | 465 |
| MyD88 | ATGGCCGCTGGGGGCCCAGGCGCC | 466 | MAAGGPGAGSAAPVSSTSSLPLAALN | 467 |
| | GGATCAGCTGCTCCCGTATCTTCTAC | | MRVRRRLSLFLNVRTQVAADWTALAEE | |
| | TTCTTCTTTGCCGCTGGCTGCTCTGA | | MDFEYLEIRQLETQADPTGRLLDAWQG | |
| | ACATGCGCGTGAGAAGACGCCTCTC | | RPGASVGRLLDLLTKLGRDDVLLELGP | |
| | CCTGTTCCTTAACGTTCGCACACAAG | | SIEEDCQKYILKQQQEEAEKPLQVAAV | |
| | TCGCTGCCGATTGGACCGCCCTTGC | | DSSVPRTAELAGITTLDDPLGHMPERF | |
| | CGAAGAAATGGACTTTGAATACCTGG | | DAFICYCPSDI | |
| | AAATTAGACAACTTGAAACACAGGCC | | | |
| | GACCCCACTGGCAGACTCCTGGACG | | | |
| | CATGGCAGGGAAGACCTGGTGCAAG | | | |
| | CGTTGGACGGCTCCTGGATCTCCTGA | | | |
| | CAAAACTGGGACGCGACGACGTACT | | | |
| | GCTTGAACTCGGACCTAGCATTGAAG | | | |
| | AAGACTGCCAAAAATATATCCTGAAA | | | |
| | CAACAACAAGAAGAAGCCGAAAAACC | | | |
| | TCTCCAAGTCGCAGCAGTGGACTCAT | | | |
| | CAGTACCCCGAACAGCTGAGCTTGCT | | | |
| | GGGATTACTACACTCGACGACCCACT | | | |
| | CGGACATATGCCTGAAAGATTCGACG | | | |
| | CTTTCATTTGCTATTGCCCCTCTGACA | | | |
| | TA | | | |
| dCD40 | AAGAAAGTTGCAAAGAAACCCACAAA | 468 | KKVAKKPTNKAPHPKQEPQEINFPDDL | 469 |
| | TAAAGCCCCACACCCTAAACAGGAAC | | PGSNTAAPVQETLHGCQPVTQEDGKE | |
| | CCCAAGAAATCAATTTCCCAGATGAT | | SRISVQERQ | |
| | CTCCCTGGATCTAATACTGCCGCCCC | | | |
| | GGTCCAAGAAACCCTGCATGGTTGCC | | | |
| | AGCCTGTCACCCAAGAGGACGGAAA | | | |
| | AGAATCACGGATTAGCGTACAAGAGA | | | |
| | GACAA | | | |
| CD3z | AGAGTGAAGTTCAGCAGGAGCGCAG | 470 | RVKFSRSADAPAYQQGQNQLYNELNL | 471 |
| | ACGCCCCCGCGTACCAGCAGGGCCA | | GRREEYDVLDKRRGRDPEMGGKPRR | |
| | GAACCAGCTCTATAACGAGCTCAATC | | KNPQEGLYNELQKDKMAEAYSEIGMK | |
| | TAGGACGAAGAGAGGAGTACGATGTT | | GERRRGKGHDGLYQGLSTATKDTYDA | |
| | TTGGACAAGAGACGTGGCCGGGACC | | LHMQALPPR | |
| | CTGAGATGGGGGGAAAGCCGAGAAG | | | |
| | GAAGAACCCTCAGGAAGGCCTGTACA | | | |
| | ATGAACTGCAGAAAGATAAGATGGCG | | | |
| | GAGGCCTACAGTGAGATTGGGATGAA | | | |
| | AGGCGAGCGCCGGAGGGGCAAGGG | | | |
| | GCACGATGGCCTTTACCAGGGTCTCA | | | |
| | GTACAGCCACCAAGGACACCTACGAC | | | |
| | GCCCTTCACATGCAAGCTCTTCCACC | | | |
| | TCGt | | | |
| Linker | Acg | 472 | T | 473 |
| FRBI\hat{ }\hat{ } | TGGCACGAAGGCCTGGAAGAGGCCT | 474 | WHEGLEEASRLYFGERNVKGMFEVLE | 475 |
| | CAAGACTTTACTTTGGTGAACGCAAC | | PLHAMMERGPQTLKETSFNQAYGRDL | |
| | GTTAAAGGCATGTTCGAGGTGCTGGA | | MEAQEWCRKYMKSGNVKDLLQAWDL | |
| | ACCCTTGCATGCAATGATGGAGCGAG | | YYHVFRRISK | |
| | GTCCTCAGACACTCAAAGAGACATCT | | | |
| | TTTAACCAGGCGTATGGACGGGACCT | | | |
| | CATGGAGGCTCAGGAATGGTGCCGC | | | |
| | AAGTACATGAAAAGTGGGAATGTGAA | | | |
| | GGATCTGCTGCAAGCATGGGATCTGT | | | |
| | ATTACCACGTGTTTAGACGGATCAGC | | | |
| | AAA | | | |
| Linker | Cgtacg | 476 | RT | 477 |
| (BsiWI) | | | | |
| FRBI | TGGCATGAAGGGTTGGAAGAAGCTTC | 478 | WHEGLEEASRLYFGERNVKGMFEVLE | 479 |
| | AAGGCTGTACTTCGGAGAGAGGAAC | | PLHAMMERGPQTLKETSFNQAYGRDL | |
| | GTGAAGGGCATGTTTGAGGTTCTTGA | | MEAQEWCRKYMKSGNVKDLLQAWDL | |
| | ACCTCTGCACGCCATGATGGAACGG | | YYHVFRRISK* | |
| | GGACCGCAGACACTGAAAGAAACCTC | | | |
| | TTTTAATCAGGCCTACGGCAGAGACC | | | |
| | TGATGGAGGCCCAAGAATGGTGTAGA | | | |
| | AAGTATATGAAATCCGGTAACGTGAA | | | |
| | AGACCTGCTCCAGGCCTGGGACCTTT | | | |
| | ATTACCATGTGTTCAGGCGGATCAGT | | | |
| | AAGTAA | | | |

TABLE 9
pBP0545.pSFG.iCasp9.2A.Her2scFv.Q.CD8stm.MC-zeta

| | | SEQ ID | | SEQ ID |
|---|---|---|---|---|
| Fragment | Nucleotide | NO: | Polypeptide | NO: |
| Kozak | GCCACC | 480 | N/A | |
| (ribosome- | | | | |
| binding | | | | |
| seq.) | | | | |
| FKBP12v36 | ATGGGAGTGCAGGTGGAGACTATTAG | 481 | MGVQVETISPGDGRTFPKRGQTCVVH | 482 |
| | CCCCGGAGATGGCAGAACATTCCCC | | YTGMLEDGKKVDSSRDRNKPFKFMLG | |
| | AAAAGAGGACAGACTTGCGTCGTGCA | | KQEVIRGWEEGVAQMSVGQRAKLTISP | |
| | TTATACTGGAATGCTGGAAGACGGCA | | DYAYGATGHPGIIPPHATLVFDVELLKLE | |
| | AGAAGGTGGACAGCAGCCGGGACCG | | | |
| | AAACAAGCCCTTCAAGTTCATGCTGG | | | |
| | GGAAGCAGGAAGTGATCCGGGGCTG | | | |
| | GGAGGAAGGAGTCGCACAGATGTCA | | | |
| | GTGGGACAGAGGGCCAAACTGACTA | | | |
| | TTAGCCCAGACTACGCTTATGGAGCA | | | |
| | ACCGGCCACCCCGGGATCATTCCCC | | | |
| | CTCATGCTACACTGGTCTTCGATGTG | | | |
| | GAGCTGCTGAAGCTGGAA | | | |
| Linker | AGCGGAGGAGGATCCGGA | 483 | SGGGSG | 484 |
| ΔCaspase9 | GTGGACGGGTTTGGAGATGTGGGAG | 485 | VDGFGDVGALESLRGNADLAYILSMEP | 486 |
| | CCCTGGAATCCCTGCGGGGCAATGC | | CGHCLIINNVNFCRESGLRTRTGSNIDC | |
| | CGATCTGGCTTACATCCTGTCTATGG | | EKLRRRFSSLHFMVEVKGDLTAKKMVL | |
| | AGCCTTGCGGCCACTGTCTGATCATT | | ALLELARQDHGALDCCVVVILSHGCQA | |
| | AACAATGTGAACTTCTGCAGAGAGAG | | SHLQFPGAVYGTDGCPVSVEKIVNIFN | |
| | CGGGCTGCGGACCAGAACAGGATCC | | GTSCPSLGGKPKLFFIQACGGEQKDHG | |
| | AATATTGACTGTGAAAAGCTGCGGAG | | FEVASTSPEDESPGSNPEPDATPFQEG | |
| | AAGGTTCTCTAGTCTGCACTTTATGGT | | LRTFDQLDAISSLPTPSDIFVSYSTFPGF | |
| | CGAGGTGAAAGGCGATCTGACCGCT | | VSWRDPKSGSWYVETLDDIFEQWAHS | |
| | AAGAAAATGGTGCTGGCCCTGCTGGA | | EDLQSLLLRVANAVSVKGIYKQMPGCF | |
| | ACTGGCTCGGCAGGACCATGGGGCA | | NFLRKKLFFKTSASRA | |
| | CTGGATTGCTGCGTGGTCGTGATCCT | | | |
| | GAGTCACGGCTGCCAGGCTTCACATC | | | |
| | TGCAGTTCCCTGGGGCAGTCTATGGA | | | |
| | ACTGACGGCTGTCCAGTCAGCGTGG | | | |
| | AGAAGATCGTGAACATCTTCAACGGC | | | |
| | ACCTCTTGCCCAAGTCTGGGCGGGA | | | |
| | AGCCCAAACTGTTCTTTATTCAGGCC | | | |
| | TGTGGAGGCGAGCAGAAAGATCACG | | | |
| | GCTTCGAAGTGGCTAGCACCTCCCCC | | | |
| | GAGGACGAATCACCTGGAAGCAACC | | | |
| | CTGAGCCAGATGCAACCCCCTTCCAG | | | |
| | GAAGGCCTGAGGACATTTGACCAGCT | | | |
| | GGATGCCATCTCAAGCCTGCCCACAC | | | |
| | CTTCTGACATTTTCGTCTCTTACAGTA | | | |
| | CTTTCCCTGGATTTGTGAGCTGGCGC | | | |
| | GATCCAAAGTCAGGCAGCTGGTACGT | | | |
| | GGAGACACTGGACGATATCTTTGAGC | | | |
| | AGTGGGCCCATTCTGAAGACCTGCAG | | | |
| | AGTCTGCTGCTGCGAGTGGCCAATG | | | |
| | CTGTCTCTGTGAAGGGGATCTACAAA | | | |
| | CAGATGCCAGGATGCTTCAACTTTCT | | | |
| | GAGAAAGAAACTGTTCTTTAAGACCT | | | |
| | CCGCATCTAGGGCC | | | |
| Linker | CCGCGG | 487 | PR | 488 |
| (SacII) | | | | |
| T2A | GAGGGCAGGGGAAGTCTTCTAACAT | 489 | EGRGSLLTCGDVEENPGP | 490 |
| | GCGGGGACGTGGAGGAAAATCCCGG | | | |
| | GCCC | | | |
| Linker | GCATGCGCCACC | 491 | ACAT | 492 |
| (NcoI) | | | | |
| Sig Peptide | ATGGAGTTTGGGTTGTCATGGTTGTT | 493 | MEFGLSWLFLVAILKGVQCSR | 494 |
| | TCTCGTCGCTATTCTCAAAGGTG | | | |
| | TACAATGCTCCCGC | | | |
| FRP5-VH | GAAGTCCAATTGCAACAGTCAGGCCC | 495 | EVQLQQSGPELKKPGETVKISCKASGY | 496 |
| (anti-Her2) | CGAATTGAAAAAGCCCGGCGAAACAG | | PFTNYGMNWVKQAPGQGLKWMGWIN | |
| | TGAAGATATCTTGTAAAGCCTCCGGT | | TSTGESTFADDFKGRFDFSLETSANTA | |
| | TACCCTTTTACGAACTATGGAATGAAC | | YLQINNLKSEDMATYFCARWEVYHGYV | |
| | TGGGTCAAACAAGCCCCTGGACAGG | | PYWGQGTTVTVSS | |
| | GATTGAAGTGGATGGGATGGATCAAT | | | |
| | ACATCAACAGGCGAGTCTACCTTCGC | | | |
| | AGATGATTTCAAAGGTCGCTTTGACTT | | | |
| | CTCACTGGAGACCAGTGCAAATACCG | | | |
| | CCTACCTTCAGATTAACAATCTTAAAA | | | |
| | GCGAGGATATGGCAACCTACTTTTGC | | | |
| | GCAAGATGGGAAGTTTATCACGGGTA | | | |
| | CGTGCCATACTGGGGACAAGGAACG | | | |
| | ACAGTGACAGTTAGTAGC | | | |
| Flex-linker | GGCGGTGGAGGCTCCGGTGGAGGC | 497 | GGGGSGGGGSGGGGS | 498 |
| | GGCTCTGGAGGAGGAGGTTCA | | | |
| FRP5VL | GACATCCAATTGACACAATCACACAA | 499 | DIQLTQSHKFLSTSVGDRVSITCKASQD | 500 |
| (anti-Her2) | ATTTCTCTCAACTTCTGTAGGAGACA | | VYNAVAWYQQKPGQSPKLLIYSASSRY | |
| | GAGTGAGCATAACCTGCAAAGCATCC | | TGVPSRFTGSGSGPDFTFTISSVQAED | |
| | CAGGACGTGTACAATGCTGTGGCTTG | | LAVYFCQQHFRTPFTFGSGTKLEIKAL | |
| | GTACCAACAGAAGCCTGGACAATCCC | | | |
| | CAAAATTGCTGATTTATTCTGCCTCTA | | | |
| | GTAGGTACACTGGGGTACCTTCTCGG | | | |
| | TTTACGGGCTCTGGGTCCGGACCAG | | | |
| | ATTTCACGTTCACAATCAGTTCCGTTC | | | |
| | AAGCTGAAGACCTCGCTGTTTATTTTT | | | |
| | GCCAGCAGCACTTCCGAACCCCTTTT | | | |
| | ACTTTTGGCTCAGGCACTAAGTTGGA | | | |
| | AATCAAGGCTTTG | | | |
| Linker (NsiI) | Atgcat | 501 | MH | 502 |
| CD34 | GAACTTCCTACTCAGGGGACTTTCTC | 503 | ELPTQGTFSNVSTNVS | 504 |
| epitope | AAACGTTAGCACAAACGTAAGT | | | |
| CD8a stalk | CCCGCCCCAAGACCCCCCACACCTG | 505 | PAPRPPTPAPTIASQPLSLRPEACRPAA | 506 |
| | CGCCGACCATTGCTTCTCAACCCCTG | | GGAVHTRGLDFACD | |
| | AGTTTGAGACCCGAGGCCTGCCGGC | | | |
| | CAGCTGCCGGCGGGGCCGTGCATAC | | | |
| | AAGAGGACTCGATTTCGCTTGCGAC | | | |
| CD8tm + | ATCTATATCTGGGCACCTCTCGCTGG | 507 | IYIWAPLAGTCGVLLLSLVITLYCNHRNR | 508 |
| stop tf | CACCTGTGGAGTCCTTCTGCTCAGCC | | RRVCKCPR | |
| | TGGTTATTACTCTGTACTGTAATCACC | | | |
| | GGAATCGCCGCCGCGTTTGTAAGTGT | | | |
| | CCCAGG | | | |
| Linker (SalI) | gtcgac | 509 | VD | 510 |
| MyD88 | ATGGCCGCTGGGGGCCCAGGCGCC | 511 | MAAGGPGAGSAAPVSSTSSLPLAALN | 512 |
| | GGATCAGCTGCTCCCGTATCTTCTAC | | MRVRRRLSLFLNVRTQVAADWTALAEE | |
| | TTCTTCTTTGCCGCTGGCTGCTCTGA | | MDFEYLEIRQLETQADPTGRLLDAWQG | |
| | ACATGCGCGTGAGAAGACGCCTCTC | | RPGASVGRLLDLLTKLGRDDVLLELGP | |
| | CCTGTTCCTTAACGTTCGCACACAAG | | SIEEDCQKYILKQQQEEAEKPLQVAAV | |
| | TCGCTGCCGATTGGACCGCCCTTGC | | DSSVPRTAELAGITTLDDPLGHMPERF | |
| | CGAAGAAATGGACTTTGAATACCTGG | | DAFICYCPSDI | |
| | AAATTAGACAACTTGAAACACAGGCC | | | |
| | GACCCCACTGGCAGACTCCTGGACG | | | |
| | CATGGCAGGGAAGACCTGGTGCAAG | | | |
| | CGTTGGACGGCTCCTGGATCTCCTGA | | | |
| | CAAAACTGGGACGCGACGACGTACT | | | |
| | GCTTGAACTCGGACCTAGCATTGAAG | | | |
| | AAGACTGCCAAAAATATATCCTGAAA | | | |
| | CAACAACAAGAAGAAGCCGAAAAACC | | | |
| | TCTCCAAGTCGCAGCAGTGGACTCAT | | | |
| | CAGTACCCCGAACAGCTGAGCTTGCT | | | |
| | GGGATTACTACACTCGACGACCCACT | | | |
| | CGGACATATGCCTGAAAGATTCGACG | | | |
| | CTTTCATTTGCTATTGCCCCTCTGACA | | | |
| | TA | | | |
| dCD40 | AAGAAAGTTGCAAAGAAACCCACAAA | 513 | KKVAKKPTNKAPHPKQEPQEINFPDDL | 514 |
| | TAAAGCCCCACACCCTAAACAGGAAC | | PGSNTAAPVQETLHGCQPVTQEDGKE | |
| | CCCAAGAAATCAATTTCCCAGATGAT | | SRISVQERQ | |
| | CTCCCTGGATCTAATACTGCCGCCCC | | | |
| | GGTCCAAGAAACCCTGCATGGTTGCC | | | |
| | AGCCTGTCACCCAAGAGGACGGAAA | | | |
| | AGAATCACGGATTAGCGTACAAGAGA | | | |
| | GACAA | | | |
| CD3z | AGAGTGAAGTTCAGCAGGAGCGCAG | 515 | RVKFSRSADAPAYQQGQNQLYNELNL | 516 |
| | ACGCCCCCGCGTACCAGCAGGGCCA | | GRREEYDVLDKRRGRDPEMGGKPRR | |
| | GAACCAGCTCTATAACGAGCTCAATC | | KNPQEGLYNELQKDKMAEAYSEIGMK | |
| | TAGGACGAAGAGAGGAGTACGATGTT | | GERRRGKGHDGLYQGLSTATKDTYDA | |
| | TTGGACAAGAGACGTGGCCGGGACC | | LHMQALPPR* | |
| | CTGAGATGGGGGGAAAGCCGAGAAG | | | |
| | GAAGAACCCTCAGGAAGGCCTGTACA | | | |
| | ATGAACTGCAGAAAGATAAGATGGCG | | | |
| | GAGGCCTACAGTGAGATTGGGATGAA | | | |
| | AGGCGAGCGCCGGAGGGGCAAGGG | | | |
| | GCACGATGGCCTTTACCAGGGTCTCA | | | |
| | GTACAGCCACCAAGGACACCTACGAC | | | |
| | GCCCTTCACATGCAAGCTCTTCCACC | | | |
| | TCGTtga | | | |

[0755] Methods discussed herein, including, but not limited to, methods for constructing vectors, assays for activity or function, administration to patients, transfecting or transforming cells, assay, and methods for monitoring patients may also be found in the following patents and patent applications, which are hereby incorporated by reference herein in their entirety.

[0756] U.S. patent application Ser. No. 14/210,034, titled METHODS FOR CONTROLLING T CELL PROLIFERATION, filed Mar. 13, 2014; U.S. patent application Ser. No. 13/112,739, filed May 20, 2011, issued as U.S. Pat. No. 9,089,520, Jul. 28, 2015, and entitled METHODS FOR INDUCING SELECTIVE APOPTOSIS; U.S. patent application Ser. No. 14/622,018, filed Feb. 13, 2014, titled METHODS FOR ACTIVATING T CELLS USING AN INDUCIBLE CHIMERIC POLYPEPTIDE; U.S. patent application Ser. No. 13/112,739, filed May 20, 2011, titled METHODS FOR INDUCING SELECTIVE APOPTOSIS; U.S. patent application Ser. No. 13/792,135, filed Mar. 10, 2013, titled MODIFIED CASPASE POLYPEPTIDES AND USES THEREOF; U.S. patent application Ser. No. 14/296,404, filed Jun. 4, 2014, titled METHODS FOR INDUCING PARTIAL APOPTOSIS USING CASPASE POLYPEPTIDES; U.S. Provisional Patent Application Ser. No. 62/044,885, filed Sep. 2, 2014, and U.S. patent application Ser. No. 14/842,710, filed Sep. 1, 2015, each titled COSTIMULATION OF CHIMERIC ANTIGEN RECEPTORS BY MyD88 AND CD40 POLYPEPTIDES; U.S. patent application Ser. No. 14/640,554, filed 6 Mar. 2015, titled CASPASE POLYPEPTIDES HAVING MODIFIED ACTIVITY AND USES THEREOF; U.S. Pat. No. 7,404,950, issued Jun. 29, 2008, to Spencer, D. et al., U.S. patent application Ser. No. 12/445,939 by Spencer, D., et al., filed Oct. 26, 2010; U.S. patent application Ser. No. 12/563,991 by Spencer, D., et al., filed Sep. 21, 2009; Ser. No. 13/087,329 by Slawin, K., et al., filed Apr. 14, 2011; Ser. No. 13/763,591 by Spencer, D., et al., filed Feb. 8, 2013; and International Patent Application Number PCT/US2014/022004, filed 7 Mar. 2014, published as PCT/US2014/022004 on 9 Oct. 2014, titled MODIFIED CASPASE POLYPEPTIDES AND USES THEREOF.

### Example 18: FRB-Based Scaffold Assembly and Activation of iCaspase-9

[0757] To determine if iCaspase-9 could be aggregated by tandem multimers of FRB_{L}, one to four tandem copies of FRB_{L} were subcloned into an expression vector, pSH1, driving transgene expression from an SRα promoter. A subset of constructs also contained the myristoylation-targeting domain from v-Src for membrane localization of the FRB-scaffold (FIG. 12A). 293 cells were transfected with the SRα-SEAP reporter plasmid along with FKBP12-ΔCaspase-9 (iCaspase-9/iC9), plus 1 of several FRB-based, non-myristoylated scaffold proteins containing 0, 1, or 4 tandem copies of FRB_{L}. Addition of either rapamycin or analog, C7-isopropoxy-rapamycin, created by the method of Luengo et al., (Luengo J I (95) Chem & Biol 2, 471-81. Luengo J I (94) J. Org Chem 59: 6512-13), led to a diminution of reporter activity when the 4×FRB construct was present, consistent with cell death, as predicted (FIG. 8B, 10D, 10E) with a IC₅₀˜3 nM (FIG. 12B). Addition of rapamycin had no effect on reporter activity when only 1 (or 0) FRB domain was present, which would preclude oligomerization of iCasp9 (FIG. 10C). Similar results were obtained when the FRB-scaffold was myristoylated (FIG. 12C) to localize the scaffold to the plasma membrane. Thus, the Caspase-9 polypeptide can be activated with rapamycin or analogs when oligomerized on a FRB-based scaffold.

### Example 19: FKBP12-Based Scaffolds Assemble and Activate FRB-ΔCaspase-9

[0758] To determine if the polarity of heterodimerization and Caspase-9 assembly could be reversed, one to four 1 to 4 tandem copies of FKBP12 were subcloned into expression vector, pSH1, as above. (FIG. 13A). As above, 293 cells were transfected with the SRα-SEAP reporter plasmid along with FRBL-ΔCaspase-9, plus a non-myristoylated scaffold protein containing 1 or 4 tandem copies of FKBP12. Addition of either rapamycin or analog, C7-isopropoxy-rapamycin, led to a diminution of reporter activity when the 4×FRB_{L} construct was present, consistent with cell death with a IC₅₀˜3 nM (FIG. 13B). Addition of rapamycin had no effect on reporter activity when only 1 (or 0) FKBP domain was present, similar to the results in FIG. 12. Thus, Caspase-9 can be activated with rapamycin or analogs when oligomerized on a FRB or FKBP12-based scaffold.

### Example 20: FRB-Based Scaffold Assembly and Activation of iCaspase-9 in Primary T Cells

[0759] To determine if iCaspase-9 could be aggregated by tandem multimers of FRB_{L} in primary, non-transformed T cells, zero to three 3 tandem copies of FRBL were subcloned into a retroviral expression vector, pBP0220--pSFG-iC9.T2A-ΔCD19, encoding Caspase-9 (iC9) along with a non-signaling truncated version of CD19 that served as a surface marker. The resulting unified plasmid vectors, named pBP0756-iC9.T2A-ΔCD19.P2A-FRB_{L}, pBP0755-iC9.T2A-ΔCD19.P2A-FRB_{L}2, and pBP0757-iC9.T2A-ΔCD19.P2A-FRB_{L}3, were subsequently used to make infectious γ-retroviruses (γ-RVs) encoding scaffolds of 1, 2 or 3 tandem FRB_{L} domains, respectively.

[0760] T cells from 3 different donors were transduced with the vectors and plated with varying rapamycin dilutions. After 24 and 48 hours, cell aliquots were harvested, stained with anti-CD19 APC and analyzed by flow cytometry. Cells were initially gated on live lymphocytes by FSC vs SSC and then plotted as a CD19 histogram and subgated for high, medium and low expression within the CD19⁺ gate. Line graphs were prepared to represent the relative percentage of the total cell population that express high levels of CD19, normalized to the no “0” drug control (FIG. 14). Similar to the surrogate SEAP reporter assay performed in transformed epithelial cells, as rapamycin concentration increased, the percentage of CD19hi cells decreased in cells expressing Caspase-9 and FRB_{L}2 or FRB_{L}3, but not in cells expressing Caspase-9 along with 0 or 1 FRB_{L} domains, indicating that rapamycin induces heterodimerization between the FRB-based scaffolds and iCaspase9, leading to Caspase-9 dimerization and cell death. Similar results were seen when rapamycin was replaced with C7-isopropoxyrapamycin.

### Example 21: FRB-Based Scaffolds Attached to Signaling Molecules can Dimerize and Activate iCaspase-9

[0761] To determine if multimers of FRB would still act as a recruitment scaffold to enable rapalog-mediated Caspase-9 dimerization when attached to another signaling domain, 1 or 2 FRB_{L} domains were fused to the potent chimeric stimulatory molecule, MyD88/CD40, to derive iMC.FRB_{L} (pBP0655) and iMC.FRB_{L}2 (pBP0498), respectively (FIG. 9B). As an initial test, 293 cells were transiently transfected with reporter plasmid SRα-SEAP, Caspase-9, a 1^{st} generation anti-HER2 CAR (pBP0488) and (pBP0655 or pBP0498) (FIG. 15). Control transfections contained Caspase-9 (pBP0044) alone or eGFP expression vector (pBP0047). In the presence of rimiducid, Caspase-9-containing cells, but not control eGFP-cells, were killed by Caspase-9 homodimerization as usual, reflected by diminution of SEAP activity (FIG. 15, left); however, rapamycin only triggered SEAP reduction in cells expressing iMC.FRB_{L}2 and Caspase-9, but not cells expressing iMC.FRB_{L} and Caspase-9, or control cells. Thus, heterodimerizer-mediated activation of Caspase-9 is possible in cells containing multimers of FRB_{L} fused to distinct proteins, such as MyD88/CD40.

[0762] In a second test for rapalog-mediated scaffold-based activation of Caspase-9, 293 cells were transiently transfected with SRα-SEAP reporter plasmid, plus myristoylated or non-myristoylated inducible iMC co-expressed with 1^{st} generation anti-CD19 CAR, plus FRB_{L}2-fused Caspase-9 (plasmid pBP0467) (FIG. 16). After 24 hours, cells were treated with log dilutions of rimiducid, rapamycin, or C7-isopropoxy (IsoP)-rapamycin. Unlike FKBP12-linked Caspase-9 (iC9), FRB_{L}2-Caspase-9 is not activated by rimiducid; however, it is activated by rapamycin or C7-isopropoxy-rapamycin when tandem FKBPs are present. Thus, rapamcyin and analogs can activate Caspase-9 via a molecular scaffold comprised of FRB or FKBP12 domains.

### Example 22: The iMC “Switch”, FKBPx2. MyD88. CD40, Creates a Scaffold for FRB_{L}2. Caspase9 in the Presence of Rapamycin to Induce Cell Death

[0763] The use of iMC as an FKBP12-based scaffold for activating FRB_{L}2-Caspase-9 was tested in primary T cells (FIG. 17). Primary T cells (2 donors) were transduced with γ-RVs derived from SFG-Δmyr.iMC.2A-CD19 (pBP0606) and SFG-FRB_{L}2. Caspase9.2A-Q.8stm.zeta (pBP0668). Transduced T cells were then plated with 5-fold dilutions of rapamycin. After 24 hours, cells were harvested and analyzed by flow cytometry for expression of iMC (via anti-CD19-APC), Caspase-9 (via anti-CD34-PE), and T cell identity (via anti-CD3-PerCPCy5.5). Cells were initially gated for lymphocyte morphology by FSC vs SSC, followed by CD3 expression (˜99% of lymphocytes).

[0764] To focus on doubly transduced cells, CD3⁺ lymphocytes were gated on CD19⁺ (ΔMyr.iMC.2A-CD19) and CD34⁺ (FRB_{I}2. Caspase9.2A-Q.8stm.zeta) expression. To normalize gated populations, percentages of CD34⁺CD19⁺ cells were divided by percent CD19⁺CD34⁻ cells within each sample as an internal control. Those values were then normalized to drug-free wells for each transduction, which were set at 100%. The results show rapid and efficient elimination of doubly transduced cells in the presence of relatively low (2 nM) levels of rapamycin (FIG. 17A, C). Similar analysis was applied to the Hi-, Med-, and Lo-expressing cells within the CD34⁺CD19⁺ gate (FIG. 17B). As rapamycin concentrations increase, percentage of CD34⁺CD19⁺ cells decrease, indicating elimination of cells. Finally, T cells from a single donor were transduced with ΔMyr.iMC.2A-CD19 (pBP0606) and FRB_{L}2. Caspase9.2A-Q.8stm.zeta (pBP0668) and plated in IL-2-containing media along with varying concentrations of rapamycin for 24 or 48 hrs. After 24 or 48 hrs, cells were harvested and analyzed by flow, as above. Interestingly, although elimination of cells expressing high levels of both transgenes was nearly complete at 24 hours, by 48 hours even cells expressing low levels of both transgenes are killed by rapamycin, showing the efficiency of the process in primary T cells (FIG. 17D).

### Example 23: Examples of Plasmids and Sequences Discussed in Examples 17-21

pBP0044: pSH1-iCaspase9wt

| | | | | SEQ |
|---|---|---|---|---|
| Fragment | Nucleotide | SEQ ID NO: | Peptide | ID NO: |
| Linker | ATG-CTCGAG | 517 | MLE | 518 |
| FKBPv36 | GGAGTGCAGGTGGAgACtATCT | 519 | GVQVETISPGDGRTFPKRGQTCVVHYT | 520 |
| | CCCCAGGAGACGGGCGCACCT | | GMLEDGKKVDSSRDRNKPFKFMLGKQ | |
| | TCCCCAAGCGCGGCCAGACCT | | EVIRGWEEGVAQMSVGQRAKLTISPDY | |
| | GCGTGGTGCACTACACCGGGA | | AYGATGHPGIIPPHATLVFDVELLKL | |
| | TGCTTGAAGATGGAAAGAAAGT | | | |
| | TGATTCCTCCCGGGACAGAAAC | | | |
| | AAGCCCTTTAAGTTTATGCTAG | | | |
| | GCAAGCAGGAGGTGATCCGAG | | | |
| | GCTGGGAAGAAGGGGTTGCCC | | | |
| | AGATGAGTGTGGGTCAGAGAG | | | |
| | CCAAACTGACTATATCTCCAGA | | | |
| | TTATGCCTATGGTGCCACTGGG | | | |
| | CACCCAGGCATCATCCCACCAC | | | |
| | ATGCCACTCTCGTCTTCGATGT | | | |
| | GGAGCTTCTAAAACTGGA | | | |
| Linker | ATCTGGCGGTGGATCCGGA | 521 | SGGGSG | 522 |
| ΔCaspase9 | GTCGACGGATTTGGTGATGTCG | 523 | VDGFGDVGALESLRGNADLAYILSMEP | 524 |
| | GTGCTCTTGAGAGTTTGAGGGG | | CGHCLIINNVNFCRESGLRTRTGSNIDC | |
| | AAATGCAGATTTGGCTTACATC | | EKLRRRFSSLHFMVEVKGDLTAKKMVL | |
| | CTGAGCATGGAGCCCTGTGGC | | ALLELARQDHGALDCCVVVILSHGCQA | |
| | CACTGCCTCATTATCAACAATG | | SHLQFPGAVYGTDGCPVSVEKIVNIFN | |
| | TGAACTTCTGCCGTGAGTCCGG | | GTSCPSLGGKPKLFFIQACGGEQKDHG | |
| | GCTCCGCACCCGCACTGGCTC | | FEVASTSPEDESPGSNPEPDATPFQEG | |
| | CAACATCGACTGTGAGAAGTTG | | LRTFDQLDAISSLPTPSDIFVSYSTFPGF | |
| | CGGCGTCGCTTCTCCTCGCTG | | VSWRDPKSGSWYVETLDDIFEQWAHS | |
| | CATTTCATGGTGGAGGTGAAGG | | EDLQSLLLRVANAVSVKGIYKQMPGCF | |
| | GCGACCTGACTGCCAAGAAAAT | | NFLRKKLFFKTS | |
| | GGTGCTGGCTTTGCTGGAGCT | | | |
| | GGCGCgGCAGGACCACGGTGC | | | |
| | TCTGGACTGCTGCGTGGTGGT | | | |
| | CATTCTCTCTCACGGCTGTCAG | | | |
| | GCCAGCCACCTGCAGTTCCCA | | | |
| | GGGGCTGTCTACGGCACAGAT | | | |
| | GGATGCCCTGTGTCGGTCGAG | | | |
| | AAGATTGTGAACATCTTCAATG | | | |
| | GGACCAGCTGCCCCAGCCTGG | | | |
| | GAGGGAAGCCCAAGCTCTTTTT | | | |
| | CATCCAGGCCTGTGGTGGGGA | | | |
| | GCAGAAAGACCATGGGTTTGAG | | | |
| | GTGGCCTCCACTTCCCCTGAAG | | | |
| | ACGAGTCCCCTGGCAGTAACC | | | |
| | CCGAGCCAGATGCCACCCCGT | | | |
| | TCCAGGAAGGTTTGAGGACCTT | | | |
| | CGACCAGCTGGACGCCATATCT | | | |
| | AGTTTGCCCACACCCAGTGACA | | | |
| | TCTTTGTGTCCTACTCTACTTTC | | | |
| | CCAGGTTTTGTTTCCTGGAGGG | | | |
| | ACCCCAAGAGTGGCTCCTGGTA | | | |
| | CGTTGAGACCCTGGACGACATC | | | |
| | TTTGAGCAGTGGGCTCACTCTG | | | |
| | AAGACCTGCAGTCCCTCCTGCT | | | |
| | TAGGGTCGCTAATGCTGTTTCG | | | |
| | GTGAAAGGGATTTATAAACAGA | | | |
| | TGCCTGGTTGCTTTAATTTCCTC | | | |
| | CGGAAAAAACTTTTCTTTAAAAC | | | |
| | ATCAGCTAGCAGAGCCGAGGG | | | |
| | CAGGGGAAGTCTTCTAACATGC | | | |
| | GGGGACGTGGAGGAAAATCCC | | | |
| | GGGCCC-tga | | | |
| Linker | GCTAGCAGAGCC | 525 | ASRA | 526 |
| T2A | GAGGGCAGGGGAAGTCTTCTA | 527 | EGRGSLLTCGDVEENPGP* | 528 |
| | ACATGCGGGGACGTGGAGGAA | | | |
| | AATCCCGGGCCC-tga | | | |

pBP0463--pSH1-Fpk-Fpk′.LS.Fpk″.Fpk′″.LS.HA

| | | | | SEQ ID |
|---|---|---|---|---|
| Fragment | Nucleotide | SEQ ID NO: | Peptide | NO: |
| Linker | ATGCTCGAG | 529 | MLE | 530 |
| FRBI | TGGCATGAAGGGTTGGAAGAA | 531 | GVQVETISPGDGRTFPKRGQTCVVHYT | 532 |
| | GCTTCAAGGCTGTACTTCGGAG | | GMLEDGKKFDSSRDRNKPFKFMLGKQ | |
| | AGAGGAACGTGAAGGGCATGT | | EVIRGWEEGVAQMSVGQRAKLTISPDY | |
| | TTGAGGTTCTTGAACCTCTGCA | | AYGATGHPPKIPPHATLVFDVELLKLE | |
| | CGCCATGATGGAACGGGGACC | | | |
| | GCAGACACTGAAAGAAACCTCT | | | |
| | TTTAATCAGGCCTACGGCAGAG | | | |
| | ACCTGATGGAGGCCCAAGAAT | | | |
| | GGTGTAGAAAGTATATGAAATC | | | |
| | CGGTAACGTGAAAGACCTGCTC | | | |
| | CAGGCCTGGGACCTTTATTACC | | | |
| | ATGTGTTCAGGCGGATCAGTAAG | | | |
| Linker | TCAGGCGGTGGCTCAGGTGTC | 533 | SGGGSGVD | 534 |
| | GAG | | | |
| Δ-Caspase9 | GTCGACGGATTTGGTGATGTCG | 535 | DGFGDVGALESLRGNADLAYILSMEPC | 536 |
| | GTGCTCTTGAGAGTTTGAGGGG | | GHCLIINNVNFCRESGLRTRTGSNIDCE | |
| | AAATGCAGATTTGGCTTACATC | | KLRRRFSSLHFMVEVKGDLTAKKMVLA | |
| | CTGAGCATGGAGCCCTGTGGC | | LLELARQDHGALDCCVVVILSHGCQAS | |
| | CACTGCCTCATTATCAACAATG | | HLQFPGAVYGTDGCPVSVEKIVNIFNG | |
| | TGAACTTCTGCCGTGAGTCCGG | | TSCPSLGGKPKLFFIQACGGEQKDHGF | |
| | GCTCCGCACCCGCACTGGCTC | | EVASTSPEDESPGSNPEPDATPFQEGL | |
| | CAACATCGACTGTGAGAAGTTG | | RTFDQLDAISSLPTPSDIFVSYSTFPGF | |
| | CGGCGTCGCTTCTCCTCGCTG | | VSWRDPKSGSWYVETLDDIFEQWAHS | |
| | CATTTCATGGTGGAGGTGAAGG | | EDLQSLLLRVANAVSVKGIYKQMPGCF | |
| | GCGACCTGACTGCCAAGAAAAT | | NFLRKKLFFKTSASRA | |
| | GGTGCTGGCTTTGCTGGAGCT | | | |
| | GGCGCgGCAGGACCACGGTGC | | | |
| | TCTGGACTGCTGCGTGGTGGT | | | |
| | CATTCTCTCTCACGGCTGTCAG | | | |
| | GCCAGCCACCTGCAGTTCCCA | | | |
| | GGGGCTGTCTACGGCACAGAT | | | |
| | GGATGCCCTGTGTCGGTCGAG | | | |
| | AAGATTGTGAACATCTTCAATG | | | |
| | GGACCAGCTGCCCCAGCCTGG | | | |
| | GAGGGAAGCCCAAGCTCTTTTT | | | |
| | CATCCAGGCCTGTGGTGGGGA | | | |
| | GCAGAAAGACCATGGGTTTGAG | | | |
| | GTGGCCTCCACTTCCCCTGAAG | | | |
| | ACGAGTCCCCTGGCAGTAACC | | | |
| | CCGAGCCAGATGCCACCCCGT | | | |
| | TCCAGGAAGGTTTGAGGACCTT | | | |
| | CGACCAGCTGGACGCCATATCT | | | |
| | AGTTTGCCCACACCCAGTGACA | | | |
| | TCTTTGTGTCCTACTCTACTTTC | | | |
| | CCAGGTTTTGTTTCCTGGAGGG | | | |
| | ACCCCAAGAGTGGCTCCTGGTA | | | |
| | CGTTGAGACCCTGGACGACATC | | | |
| | TTTGAGCAGTGGGCTCACTCTG | | | |
| | AAGACCTGCAGTCCCTCCTGCT | | | |
| | TAGGGTCGCTAATGCTGTTTCG | | | |
| | GTGAAAGGGATTTATAAACAGA | | | |
| | TGCCTGGTTGCTTTAATTTCCTC | | | |
| | CGGAAAAAACTTTTCTTTAAAAC | | | |
| | ATCAGCTAGCAGAGCC | | | |
| T2A | GAGGGCAGGGGAAGTCTTCTA | 537 | EGRGSLLTCGDVEENPGP | 538 |
| | ACATGCGGGGACGTGGAGGAA | | | |
| | AATCCCGGGCCCtga | | | |

pBP0725--pSH1-FRBI.FRBI′.LS.FRBI″.FRBI′″

| | | | | SEQ |
|---|---|---|---|---|
| | | | | ID |
| Fragment | Nucleotide | SEQ ID NO: | Peptide | NO: |
| FRBI | ATGctcgagTGGCATGAAGGCCT | 539 | MLEWHEGLEEASRLYFGERNVKGMFE | 540 |
| | GGAAGAGGCATCTCGTTTGTAC | | VLEPLHAMMERGPQTLKETSFNQAYG | |
| | TTTGGGGAAAGGAACGTGAAA | | RDLMEAQEWCRKYMKSGNVKDLLQA | |
| | GGCATGTTTGAGGTGCTGGAG | | WDLYYHVFRRISK | |
| | CCCTTGCACGCTATGATGGAAC | | | |
| | GGGGCCCCCAGACTCTGAAGG | | | |
| | AAACATCCTTTAATCAGGCCTA | | | |
| | TGGTCGAGATTTAATGGAGGCC | | | |
| | CAAGAGTGGTGCAGGAAGTAC | | | |
| | ATGAAATCAGGGAATGTCAAGG | | | |
| | ACCTCCTCCAAGCCTGGGACC | | | |
| | TCTATTATCATGTGTTCCGACG | | | |
| | AATCTCAAAG | | | |
| Linker | gtcgag | 541 | VD | 542 |
| FRBI′ | TGGCATGAAGGGTTGGAAGAA | 543 | WHEGLEEASRLYFGERNVKGMFEVLE | 544 |
| | GCTTCAAGGCTGTACTTCGGAG | | PLHAMMERGPQTLKETSFNQAYGRDL | |
| | AGAGGAACGTGAAGGGCATGT | | MEAQEWCRKYMKSGNVKDLLQAWDL | |
| | TTGAGGTTCTTGAACCTCTGCA | | YYHVFRRISK | |
| | CGCCATGATGGAACGGGGACC | | | |
| | GCAGACACTGAAAGAAACCTCT | | | |
| | TTTAATCAGGCCTACGGCAGAG | | | |
| | ACCTGATGGAGGCCCAAGAAT | | | |
| | GGTGTAGAAAGTATATGAAATC | | | |
| | CGGTAACGTGAAAGACCTGCT | | | |
| | CCAGGCCTGGGACCTTTATTAC | | | |
| | CATGTGTTCAGGCGGATCAGTA | | | |
| | AG | | | |
| Linker | TCAGGCGGTGGCTCAGGTGTC | 545 | SGGGSGVD | 546 |
| | GAG | | | |
| FRBI″ | TGGCATGAAGGCCTGGAAGAG | 547 | WHEGLEEASRLYFGERNVKGMFEVLE | 548 |
| | GCATCTCGTTTGTACTTTGGGG | | PLHAMMERGPQTLKETSFNQAYGRDL | |
| | AAAGGAACGTGAAAGGCATGTT | | MEAQEWCRKYMKSGNVKDLLQAWDL | |
| | TGAGGTGCTGGAGCCCTTGCA | | YYHVFRRISK | |
| | CGCTATGATGGAACGGGGCCC | | | |
| | CCAGACTCTGAAGGAAACATCC | | | |
| | TTTAATCAGgCCTATGGTCGAG | | | |
| | ATTTAATGGAGGCCCAAGAGTG | | | |
| | GtGCAGGAAGTACATGAAATCA | | | |
| | GGGAATGTCAAGGACCTCCTC | | | |
| | CAAGCCTGGGACCTCTATTATC | | | |
| | ATGTGTTCCGACGAATCTCAAAG | | | |
| Linker | GTCGAC | 549 | VD | 550 |
| FRBI′″ | TGGCATGAAGGGTTGGAAGAA | 551 | WHEGLEEASRLYFGERNVKGMFEVLE | 552 |
| | GCTTCAAGGCTGTACTTCGGAG | | PLHAMMERGPQTLKETSFNQAYGRDL | |
| | AGAGGAACGTGAAGGGCATGT | | MEAQEWCRKYMKSGNVKDLLQAWDL | |
| | TTGAGGTTCTTGAACCTCTGCA | | YYHVFRRISK | |
| | CGCCATGATGGAACGGGGACC | | | |
| | GCAGACACTGAAAGAAACCTCT | | | |
| | TTTAATCAGGCCTACGGCAGAG | | | |
| | ACCTGATGGAGGCCCAAGAAT | | | |
| | GGTGTaGAAAGTATATGAAATC | | | |
| | CGGTAACGTGAAAGACCTGCT | | | |
| | CCAGGCCTGGGACCTTTATTAC | | | |
| | CATGTGTTCAGGCGGATCAGTA | | | |
| | AGTCAGGCGGTGGCTCAGGTG | | | |
| | TCGAC | | | |
| Linker | GTCGAC | 553 | VE | 554 |
| HA tag | TATCCGTACGACGTACCAGACT | 555 | YPYDVPDYALD* | 556 |
| | ACGCACTCGACTAA | | | |

pBP0465--pSH1-M-FRBI.FRBI′.LS.HA

| | | | | SEQ |
|---|---|---|---|---|
| Fragment | Nucleotide | SEQ ID NO: | Peptide | ID NO: |
| Myr | atgggctgtgtgcaatgtaaggataaagaag | 557 | MGCVQCKDKEATKLTEE | 558 |
| | caacaaaactgacggaggag | | | |
| Linker | CTCGAG | 559 | LG | 560 |
| FRBI | TGGCATGAAGGCCTGGAAGAG | 561 | MLEWHEGLEEASRLYFGERNVKGMFE | 562 |
| | GCATCTCGTTTGTACTTTGGGG | | VLEPLHAMMERGPQTLKETSFNQAYG | |
| | AAAGGAACGTGAAAGGCATGTT | | RDLMEAQEWCRKYMKSGNVKDLLQA | |
| | TGAGGTGCTGGAGCCCTTGCA | | WDLYYHVFRRISK | |
| | CGCTATGATGGAACGGGGCCC | | | |
| | CCAGACTCTGAAGGAAACATCC | | | |
| | TTTAATCAGGCCTATGGTCGAG | | | |
| | ATTTAATGGAGGCCCAAGAGTG | | | |
| | GTGCAGGAAGTACATGAAATCA | | | |
| | GGGAATGTCAAGGACCTCCTCC | | | |
| | AAGCCTGGGACCTCTATTATCA | | | |
| | TGTGTTCCGACGAATCTCAAAG | | | |
| Linker | gtcgag | 563 | VD | 564 |
| FRBI′ | TGGCATGAAGGGTTGGAAGAA | 565 | WHEGLEEASRLYFGERNVKGMFEVLE | 566 |
| | GCTTCAAGGCTGTACTTCGGAG | | PLHAMMERGPQTLKETSFNQAYGRDL | |
| | AGAGGAACGTGAAGGGCATGT | | MEAQEWCRKYMKSGNVKDLLQAWDL | |
| | TTGAGGTTCTTGAACCTCTGCA | | YYHVFRRISK | |
| | CGCCATGATGGAACGGGGACC | | | |
| | GCAGACACTGAAAGAAACCTCT | | | |
| | TTTAATCAGGCCTACGGCAGAG | | | |
| | ACCTGATGGAGGCCCAAGAAT | | | |
| | GGTGTAGAAAGTATATGAAATC | | | |
| | CGGTAACGTGAAAGACCTGCTC | | | |
| | CAGGCCTGGGACCTTTATTACC | | | |
| | ATGTGTTCAGGCGGATCAGTAAG | | | |
| Linker | TCAGGCGGTGGCTCAGGTG | 567 | SGGGSGVD | 568 |
| HA tag | tatccgtacgacgtaccagactacgcactcga | 569 | YPYDVPDYALD* | 570 |
| | ctaa | | | |

pBP0722--pSH1-Fpk-Fpk′.LS.Fpk″.Fpk′″.LS.HA

| | | | | SEQ |
|---|---|---|---|---|
| Fragment | Nucleotide | SEQ ID NO: | Peptide | ID NO: |
| Linker | ATGCTCGAG | 571 | MLE | 572 |
| FKBPpk | GGcGTcCAaGTcGAaACcATtagtC | 573 | GVQVETISPGDGRTFPKRGQTCVVHYT | 574 |
| | CcGGcGAtGGcaGaACaTTtCCtAA | | GMLEDGKKFDSSRDRNKPFKFMLGKQ | |
| | aaGgGGaCAaACaTGtGTcGTcCA | | EVIRGWEEGVAQMSVGQRAKLTISPDY | |
| | tTAtACaGGcATGtTgGAgGAcGGc | | AYGATGHPPKIPPHATLVFDVELLKLE | |
| | AAaAAgttcGAcagtagtaGaGAtcGc | | | |
| | AAtAAaCCtTTcAAaTTcATGtTgG | | | |
| | GaAAaCAaGAaGTcATtaGgGGaT | | | |
| | GGGAgGAgGGcGTgGCtCAaATG | | | |
| | tccGTcGGcCAacGcGCtAAgCTcA | | | |
| | CcATcagcCCcGAcTAcGCaTAcG | | | |
| | GcGCtACcGGaCAtCCccctaagATt | | | |
| | CCcCCtCAcGCtACctTgGTgTTtG | | | |
| | AcGTcGAaCTgtTgAAgCTcGAa | | | |
| Linker | gtcgag | 575 | VD | 576 |
| FKBPpk′ | ggagtgcaggtggagactatctccccaggag | 577 | GVQVETISPGDGRTFPKRGQTCVVHYT | 578 |
| | acgggcgcaccttccccaagcgcggccaga | | GMLEDGKKFDSSRDRNKPFKFMLGKQ | |
| | cctgcgtggtgcactacaccgggatgcttgaa | | EVIRGWEEGVAQMSVGQRAKLTISPDY | |
| | gatggaaagaaattcgattcctctcgggacag | | AYGATGHPPKIPPHATLVFDVELLKLE | |
| | aaacaagccctttaagtttatgctaggcaagc | | | |
| | aggaggtgatccgaggctgggaagaaggg | | | |
| | gttgcccagatgagtgtgggtcagagagcca | | | |
| | aactgactatatctccagattatgcctatggtgc | | | |
| | cactgggcacccacctaagatcccaccacat | | | |
| | gccactctcgtcttcgatgtggagcttctaaaa | | | |
| | ctggaa | | | |
| Linker | TCAGGCGGTGGCTCAGGTGTC | 579 | SGGGSGVD | 580 |
| | GAG | | | |
| FKBPpk″ | GGcGTcCAaGTcGAaACcATtagtC | 581 | GVQVETISPGDGRTFPKRGQTCVVHYT | 582 |
| | CcGGcGAtGGcaGaACaTTtCCtAA | | GMLEDGKKFDSSRDRNKPFKFMLGKQ | |
| | aaGgGGaCAaACaTGtGTcGTcCA | | EVIRGWEEGVAQMSVGQRAKLTISPDY | |
| | tTAtACaGGcATGtTgGAgGAcGGc | | AYGATGHPPKIPPHATLVFDVELLKLE | |
| | AAaAAgttcGAcagtagtaGaGAtcGc | | | |
| | AAtAAaCCtTTcAAaTTcATGtTgG | | | |
| | GaAAaCAaGAaGTcATtaGgGGaT | | | |
| | GGGAgGAgGGcGTgGCtCAaATG | | | |
| | tccGTcGGcCAacGcGCtAAgCTcA | | | |
| | CcATcagcCCcGAcTAcGCaTAcG | | | |
| | GcGCtACcGGaCAtCCccctaagATt | | | |
| | CCcCCtCAcGCtACctTgGTgTTtG | | | |
| | AcGTcGAaCTgtTgAAgCTcGAa | | | |
| Linker | GTCGAC | 583 | VD | 584 |
| FKBPpk′″ | ggagtgcaggtggagactatctccccaggag | 585 | GVQVETISPGDGRTFPKRGQTCVVHYT | 586 |
| | acgggcgcaccttccccaagcgcggccaga | | GMLEDGKKFDSSRDRNKPFKFMLGKQ | |
| | cctgcgtggtgcactacaccgggatgcttgaa | | EVIRGWEEGVAQMSVGQRAKLTISPDY | |
| | gatggaaagaaattcgattcctctcgggacag | | AYGATGHPPKIPPHATLVFDVELLKLE | |
| | aaacaagccctttaagtttatgctaggcaagc | | | |
| | aggaggtgatccgaggctgggaagaaggg | | | |
| | gttgcccagatgagtgtgggtcagagagcca | | | |
| | aactgactatatctccagattatgcctatggtgc | | | |
| | cactgggcacccacctaagatcccaccacat | | | |
| | gccactctcgtcttcgatgtggagcttctaaaa | | | |
| | ctggaa | | | |
| Linker | TCAGGCGGTGGCTCAGGTGTC | 587 | SGGGSGVD | 588 |
| | GAG | | | |
| HA tag | TATCCGTACGACGTACCAGACT | 589 | YPYDVPDYALD* | 590 |
| | ACGCACTCGACTAA | | | |

pBP0220--pSFG-iC9.T2A-ΔCD19

| | | | | SEQ |
|---|---|---|---|---|
| Fragment | Nucleotide | SEQ ID NO: | Peptide | ID NO: |
| FKBP12v36 | ATGCTCGAGGGAGTGCAGGTG | 591 | MLEGVQVETISPGDGRTFPKRGQTCVV | 592 |
| | GAGACTATCTCCCCAGGAGAC | | HYTGMLEDGKKVDSSRDRNKPFKFML | |
| | GGGCGCACCTTCCCCAAGCGC | | GKQEVIRGWEEGVAQMSVGQRAKLTI | |
| | GGCCAGACCTGCGTGGTGCAC | | SPDYAYGATGHPGIIPPHATLVFDVELL | |
| | TACACCGGGATGCTTGAAGATG | | KLE | |
| | GAAAGAAAGTTGATTCCTCCCG | | | |
| | GGACAGAAACAAGCCCTTTAAG | | | |
| | TTTATGCTAGGCAAGCAGGAGG | | | |
| | TGATCCGAGGCTGGGAAGAAG | | | |
| | GGGTTGCCCAGATGAGTGTGG | | | |
| | GTCAGAGAGCCAAACTGACTAT | | | |
| | ATCTCCAGATTATGCCTATGGT | | | |
| | GCCACTGGGCACCCAGGCATC | | | |
| | ATCCCACCACATGCCACTCTCG | | | |
| | TCTTCGATGTGGAGCTTCTAAA | | | |
| | ACTGGAA | | | |
| Linker | TCTGGCGGTGGATCCGGA | 593 | SGGGSG | 594 |
| ΔCaspase9 | GTCGACGGATTTGGTGATGTCG | 595 | VDGFGDVGALESLRGNADLAYILSMEP | 596 |
| | GTGCTCTTGAGAGTTTGAGGGG | | CGHCLIINNVNFCRESGLRTRTGSNIDC | |
| | AAATGCAGATTTGGCTTACATC | | EKLRRRFSSLHFMVEVKGDLTAKKMVL | |
| | CTGAGCATGGAGCCCTGTGGC | | ALLELARQDHGALDCCVVVILSHGCQA | |
| | CACTGCCTCATTATCAACAATG | | SHLQFPGAVYGTDGCPVSVEKIVNIFN | |
| | TGAACTTCTGCCGTGAGTCCGG | | GTSCPSLGGKPKLFFIQACGGEQKDHG | |
| | GCTCCGCACCCGCACTGGCTC | | FEVASTSPEDESPGSNPEPDATPFQEG | |
| | CAACATCGACTGTGAGAAGTTG | | LRTFDQLDAISSLPTPSDIFVSYSTFPGF | |
| | CGGCGTCGCTTCTCCTCGCTG | | VSWRDPKSGSWYVETLDDIFEQWAHS | |
| | CATTTCATGGTGGAGGTGAAGG | | EDLQSLLLRVANAVSVKGIYKQMPGCF | |
| | GCGACCTGACTGCCAAGAAAAT | | NFLRKKLFFKTSASRA | |
| | GGTGCTGGCTTTGCTGGAGCT | | | |
| | GGCGCGGCAGGACCACGGTGC | | | |
| | TCTGGACTGCTGCGTGGTGGT | | | |
| | CATTCTCTCTCACGGCTGTCAG | | | |
| | GCCAGCCACCTGCAGTTCCCA | | | |
| | GGGGCTGTCTACGGCACAGAT | | | |
| | GGATGCCCTGTGTCGGTCGAG | | | |
| | AAGATTGTGAACATCTTCAATG | | | |
| | GGACCAGCTGCCCCAGCCTGG | | | |
| | GAGGGAAGCCCAAGCTCTTTTT | | | |
| | CATCCAGGCCTGTGGTGGGGA | | | |
| | GCAGAAAGACCATGGGTTTGAG | | | |
| | GTGGCCTCCACTTCCCCTGAAG | | | |
| | ACGAGTCCCCTGGCAGTAACC | | | |
| | CCGAGCCAGATGCCACCCCGT | | | |
| | TCCAGGAAGGTTTGAGGACCTT | | | |
| | CGACCAGCTGGACGCCATATCT | | | |
| | AGTTTGCCCACACCCAGTGACA | | | |
| | TCTTTGTGTCCTACTCTACTTTC | | | |
| | CCAGGTTTTGTTTCCTGGAGGG | | | |
| | ACCCCAAGAGTGGCTCCTGGTA | | | |
| | CGTTGAGACCCTGGACGACATC | | | |
| | TTTGAGCAGTGGGCTCACTCTG | | | |
| | AAGACCTGCAGTCCCTCCTGCT | | | |
| | TAGGGTCGCTAATGCTGTTTCG | | | |
| | GTGAAAGGGATTTATAAACAGA | | | |
| | TGCCTGGTTGCTTTAATTTCCTC | | | |
| | CGGAAAAAACTTTTCTTTAAAAC | | | |
| | ATCAGCTAGCAGAGCC | | | |
| T2A | GAGGGCAGGGGAAGTCTTCTA | 597 | EGRGSLLTCGDVEENPGP | 598 |
| | ACATGCGGGGACGTGGAGGAA | | | |
| | AATCCCGGGCCC | | | |
| ΔCD19 | ATGCCACCTCCTCGCCTCCTCT | 599 | MPPPRLLFFLLFLTPMEVRPEEPLVVKV | 600 |
| | TCTTCCTCCTCTTCCTCACCCC | | EEGDNAVLQCLKGTSDGPTQQLTWSR | |
| | CATGGAAGTCAGGCCCGAGGA | | ESPLKPFLKLSLGLPGLGIHMRPLAIWL | |
| | ACCTCTAGTGGTGAAGGTGGAA | | FIFNVSQQMGGFYLCQPGPPSEKAWQ | |
| | GAGGGAGATAACGCTGTGCTG | | PGWTVNVEGSGELFRWNVSDLGGLG | |
| | CAGTGCCTCAAGGGGACCTCA | | CGLKNRSSEGPSSPSGKLMSPKLYVW | |
| | GATGGCCCCACTCAGCAGCTG | | AKDRPEIWEGEPPCLPPRDSLNQSLSQ | |
| | ACCTGGTCTCGGGAGTCCCCG | | DLTMAPGSTLWLSCGVPPDSVSRGPL | |
| | CTTAAACCCTTCTTAAAACTCAG | | SWTHVHPKGPKSLLSLELKDDRPARD | |
| | CCTGGGGCTGCCAGGCCTGGG | | MWVMETGLLLPRATAQDAGKYYCHRG | |
| | AATCCACATGAGGCCCCTGGC | | NLTMSFHLEITARPVLWHWLLRTGGWK | |
| | CATCTGGCTTTTCATCTTCAAC | | VSAVTLAYLIFCLCSLVGILHLQRALVLR | |
| | GTCTCTCAACAGATGGGGGGC | | RKRKRMTDPTRRF* | |
| | TTCTACCTGTGCCAGCCGGGG | | | |
| | CCCCCCTCTGAGAAGGCCTGG | | | |
| | CAGCCTGGCTGGACAGTCAAT | | | |
| | GTGGAGGGCAGCGGGGAGCTG | | | |
| | TTCCGGTGGAATGTTTCGGACC | | | |
| | TAGGTGGCCTGGGCTGTGGCC | | | |
| | TGAAGAACAGGTCCTCAGAGG | | | |
| | GCCCCAGCTCCCCTTCCGGGA | | | |
| | AGCTCATGAGCCCCAAGCTGTA | | | |
| | TGTGTGGGCCAAAGACCGCCC | | | |
| | TGAGATCTGGGAGGGAGAGCC | | | |
| | TCCGTGTCTCCCACCGAGGGA | | | |
| | CAGCCTGAACCAGAGCCTCAG | | | |
| | CCAGGACCTCACCATGGCCCC | | | |
| | TGGCTCCACACTCTGGCTGTCC | | | |
| | TGTGGGGTACCCCCTGACTCTG | | | |
| | TGTCCAGGGGCCCCCTCTCCT | | | |
| | GGACCCATGTGCACCCCAAGG | | | |
| | GGCCTAAGTCATTGCTGAGCCT | | | |
| | AGAGCTGAAGGACGATCGCCC | | | |
| | GGCCAGAGATATGTGGGTAATG | | | |
| | GAGACGGGTCTGTTGTTGCCC | | | |
| | CGGGCCACAGCTCAAGACGCT | | | |
| | GGAAAGTATTATTGTCACCGTG | | | |
| | GCAACCTGACCATGTCATTCCA | | | |
| | CCTGGAGATCACTGCTCGGCC | | | |
| | AGTACTATGGCACTGGCTGCTG | | | |
| | AGGACTGGTGGCTGGAAGGTC | | | |
| | TCAGCTGTGACTTTGGCTTATC | | | |
| | TGATCTTCTGCCTGTGTTCCCT | | | |
| | TGTGGGCATTCTTCATCTTCAA | | | |
| | AGAGCCCTGGTCCTGAGGAGG | | | |
| | AAAAGAAAGCGAATGACTGACC | | | |
| | CCACCAGGAGATTCTAA | | | |

pBP0756--pSFG-iC9.T2A-dCD19.P2A-FRBₗ

| | | | | SEQ ID |
|---|---|---|---|---|
| Fragment | Nucleotide | SEQ ID NO: | Peptide | NO: |
| FKBP12v36 | ATGCTCGAGGGAGTGCAGGT | 601 | MLEGVQVETISPGDGRTFPKRGQTCV | 602 |
| | GGAGACTATCTCCCCAGGAG | | VHYTGMLEDGKKVDSSRDRNKPFKF | |
| | ACGGGCGCACCTTCCCCAAG | | MLGKQEVIRGWEEGVAQMSVGQRAK | |
| | CGCGGCCAGACCTGCGTGGT | | LTISPDYAYGATGHPGIIPPHATLVFDV | |
| | GCACTACACCGGGATGCTTG | | ELLKLE | |
| | AAGATGGAAAGAAAGTTGATT | | | |
| | CCTCCCGGGACAGAAACAAG | | | |
| | CCCTTTAAGTTTATGCTAGGC | | | |
| | AAGCAGGAGGTGATCCGAGG | | | |
| | CTGGGAAGAAGGGGTTGCCC | | | |
| | AGATGAGTGTGGGTCAGAGA | | | |
| | GCCAAACTGACTATATCTCCA | | | |
| | GATTATGCCTATGGTGCCACT | | | |
| | GGGCACCCAGGCATCATCCC | | | |
| | ACCACATGCCACTCTCGTCTT | | | |
| | CGATGTGGAGCTTCTAAAACT | | | |
| | GGAA | | | |
| Linker | TCTGGCGGTGGATCCGGA | 603 | SGGGSG | 604 |
| dCaspase9 | GTCGACGGATTTGGTGATGTC | 605 | VDGFGDVGALESLRGNADLAYILSME | 606 |
| | GGTGCTCTTGAGAGTTTGAGG | | PCGHCLIINNVNFCRESGLRTRTGSNI | |
| | GGAAATGCAGATTTGGCTTAC | | DCEKLRRRFSSLHFMVEVKGDLTAKK | |
| | ATCCTGAGCATGGAGCCCTGT | | MVLALLELARQDHGALDCCVVVILSH | |
| | GGCCACTGCCTCATTATCAAC | | GCQASHLQFPGAVYGTDGCPVSVEKI | |
| | AATGTGAACTTCTGCCGTGAG | | VNIFNGTSCPSLGGKPKLFFIQACGGE | |
| | TCCGGGCTCCGCACCCGCAC | | QKDHGFEVASTSPEDESPGSNPEPD | |
| | TGGCTCCAACATCGACTGTGA | | ATPFQEGLRTFDQLDAISSLPTPSDIF | |
| | GAAGTTGCGGCGTCGCTTCT | | VSYSTFPGFVSWRDPKSGSWYVETL | |
| | CCTCGCTGCATTTCATGGTGG | | DDIFEQWAHSEDLQSLLLRVANAVSV | |
| | AGGTGAAGGGCGACCTGACT | | KGIYKQMPGCFNFLRKKLFFKTSASRA | |
| | GCCAAGAAAATGGTGCTGGC | | | |
| | TTTGCTGGAGCTGGCGCGGC | | | |
| | AGGACCACGGTGCTCTGGAC | | | |
| | TGCTGCGTGGTGGTCATTCTC | | | |
| | TCTCACGGCTGTCAGGCCAG | | | |
| | CCACCTGCAGTTCCCAGGGG | | | |
| | CTGTCTACGGCACAGATGGAT | | | |
| | GCCCTGTGTCGGTCGAGAAG | | | |
| | ATTGTGAACATCTTCAATGGG | | | |
| | ACCAGCTGCCCCAGCCTGGG | | | |
| | AGGGAAGCCCAAGCTCTTTTT | | | |
| | CATCCAGGCCTGTGGTGGGG | | | |
| | AGCAGAAAGACCATGGGTTTG | | | |
| | AGGTGGCCTCCACTTCCCCT | | | |
| | GAAGACGAGTCCCCTGGCAG | | | |
| | TAACCCCGAGCCAGATGCCA | | | |
| | CCCCGTTCCAGGAAGGTTTGA | | | |
| | GGACCTTCGACCAGCTGGAC | | | |
| | GCCATATCTAGTTTGCCCACA | | | |
| | CCCAGTGACATCTTTGTGTCC | | | |
| | TACTCTACTTTCCCAGGTTTT | | | |
| | GTTTCCTGGAGGGACCCCAA | | | |
| | GAGTGGCTCCTGGTACGTTG | | | |
| | AGACCCTGGACGACATCTTTG | | | |
| | AGCAGTGGGCTCACTCTGAA | | | |
| | GACCTGCAGTCCCTCCTGCTT | | | |
| | AGGGTCGCTAATGCTGTTTCG | | | |
| | GTGAAAGGGATTTATAAACAG | | | |
| | ATGCCTGGTTGCTTTAATTTC | | | |
| | CTCCGGAAAAAACTTTTCTTTA | | | |
| | AAACATCAGCTAGCAGAGCC | | | |
| T2A | GAGGGCAGGGGAAGTCTTCT | 607 | EGRGSLLTCGDVEENPGP | 608 |
| | AACATGCGGGGACGTGGAGG | | | |
| | AAAATCCCGGGCCC | | | |
| dCD19 | ATGCCACCTCCTCGCCTCCTC | 609 | MPPPRLLFFLLFLTPMEVRPEEPLVVK | 610 |
| | TTCTTCCTCCTCTTCCTCACC | | VEEGDNAVLQCLKGTSDGPTQQLTW | |
| | CCCATGGAAGTCAGGCCCGA | | SRESPLKPFLKLSLGLPGLGIHMRPLAI | |
| | GGAACCTCTAGTGGTGAAGG | | WLFIFNVSQQMGGFYLCQPGPPSEK | |
| | TGGAAGAGGGAGATAACGCT | | AWQPGWTVNVEGSGELFRWNVSDL | |
| | GTGCTGCAGTGCCTCAAGGG | | GGLGCGLKNRSSEGPSSPSGKLMSP | |
| | GACCTCAGATGGCCCCACTC | | KLYVWAKDRPEIWEGEPPCLPPRDSL | |
| | AGCAGCTGACCTGGTCTCGG | | NQSLSQDLTMAPGSTLWLSCGVPPD | |
| | GAGTCCCCGCTTAAACCCTTC | | SVSRGPLSWTHVHPKGPKSLLSLELK | |
| | TTAAAACTCAGCCTGGGGCTG | | DDRPARDMWVMETGLLLPRATAQDA | |
| | CCAGGCCTGGGAATCCACAT | | GKYYCHRGHLTMSFHLEITARPVLWH | |
| | GAGGCCCCTGGCCATCTGGC | | WLLRTGGWKVSAVTLAYLIFCLCSLV | |
| | TTTTCATCTTCAACGTCTCTCA | | GILHLQRALVLRRKRKRMTDPTRRF | |
| | ACAGATGGGGGGCTTCTACC | | | |
| | TGTGCCAGCCGGGGCCCCCC | | | |
| | TCTGAGAAGGCCTGGCAGCC | | | |
| | TGGCTGGACAGTCAATGTGG | | | |
| | AGGGCAGCGGGGAGCTGTTC | | | |
| | CGGTGGAATGTTTCGGACCTA | | | |
| | GGTGGCCTGGGCTGTGGCCT | | | |
| | GAAGAACAGGTCCTCAGAGG | | | |
| | GCCCCAGCTCCCCTTCCGGG | | | |
| | AAGCTCATGAGCCCCAAGCT | | | |
| | GTATGTGTGGGCCAAAGACC | | | |
| | GCCCTGAGATCTGGGAGGGA | | | |
| | GAGCCTCCGTGTCTCCCACC | | | |
| | GAGGGACAGCCTGAACCAGA | | | |
| | GCCTCAGCCAGGACCTCACC | | | |
| | ATGGCCCCTGGCTCCACACT | | | |
| | CTGGCTGTCCTGTGGGGTAC | | | |
| | CCCCTGACTCTGTGTCCAGG | | | |
| | GGCCCCCTCTCCTGGACCCA | | | |
| | TGTGCACCCCAAGGGGCCTA | | | |
| | AGTCATTGCTGAGCCTAGAGC | | | |
| | TGAAGGACGATCGCCCGGCC | | | |
| | AGAGATATGTGGGTAATGGAG | | | |
| | ACGGGTCTGTTGTTGCCCCG | | | |
| | GGCCACAGCTCAAGACGCTG | | | |
| | GAAAGTATTATTGTCACCGTG | | | |
| | GCAACCTGACCATGTCATTCC | | | |
| | ACCTGGAGATCACTGCTCGG | | | |
| | CCAGTACTATGGCACTGGCTG | | | |
| | CTGAGGACTGGTGGCTGGAA | | | |
| | GGTCTCAGCTGTGACTTTGGC | | | |
| | TTATCTGATCTTCTGCCTGTG | | | |
| | TTCCCTTGTGGGCATTCTTCA | | | |
| | TCTTCAAAGAGCCCTGGTCCT | | | |
| | GAGGAGGAAAAGAAAGCGAA | | | |
| | TGACTGACCCCACCAGGAGA | | | |
| | TTC | | | |
| gsg | GGGAGTGGG | 611 | GSG | 612 |
| P2A | GCTACGAATTTTAGCTTGCTG | 613 | ATNFSLLKQAGDVEENPGP | 614 |
| | AAGCAGGCCGGTGATGTGGA | | | |
| | AGAGAACCCCGGGCCT | | | |
| FRBI | TGGCACGAAGGTTTGGAAGA | 615 | WHEGLEEASRLYFGERNVKGMFEVL | 616 |
| | GGCCTCCCGCCTGTATTTCG | | EPLHAMMERGPQTLKETSFNQAYGR | |
| | GTGAGAGAAATGTCAAAGGTA | | DLMEAQEWCRKYMKSGNVKDLLQA | |
| | TGTTTGAAGTGCTTGAGCCCC | | WDLYYHVFRRISK* | |
| | TGCACGCCATGATGGAACGG | | | |
| | GGGCCGCAGACTCTGAAAGA | | | |
| | AACCTCATTCAACCAGGCATA | | | |
| | CGGGCGAGACCTGATGGAAG | | | |
| | CGCAGGAATGGTGTAGGAAG | | | |
| | TACATGAAGTCCGGAAATGTG | | | |
| | AAGGACTTGCTCCAGGCTTG | | | |
| | GGACCTGTACTATCACGTATT | | | |
| | TCGGAGAATAAGCAAG-TAA | | | |

pBP0755--pSFG-iC9.T2A-dCD19.P2A-FRBₗ2

| | | | | SEQ ID |
|---|---|---|---|---|
| Fragment | Nucleotide | SEQ ID NO: | Peptide | NO: |
| FKBP12v36 | ATGCTCGAGGGAGTGCAGGT | 617 | MLEGVQVETISPGDGRTFPKRGQTCV | 618 |
| | GGAGACTATCTCCCCAGGAG | | VHYTGMLEDGKKVDSSRDRNKPFKF | |
| | ACGGGCGCACCTTCCCCAAG | | MLGKQEVIRGWEEGVAQMSVGQRAK | |
| | CGCGGCCAGACCTGCGTGG | | LTISPDYAYGATGHPGIIPPHATLVFDV | |
| | TGCACTACACCGGGATGCTT | | ELLKLE | |
| | GAAGATGGAAAGAAAGTTGA | | | |
| | TTCCTCCCGGGACAGAAACA | | | |
| | AGCCCTTTAAGTTTATGCTAG | | | |
| | GCAAGCAGGAGGTGATCCGA | | | |
| | GGCTGGGAAGAAGGGGTTG | | | |
| | CCCAGATGAGTGTGGGTCAG | | | |
| | AGAGCCAAACTGACTATATCT | | | |
| | CCAGATTATGCCTATGGTGC | | | |
| | CACTGGGCACCCAGGCATCA | | | |
| | TCCCACCACATGCCACTCTC | | | |
| | GTCTTCGATGTGGAGCTTCT | | | |
| | AAAACTGGAA | | | |
| Linker | TCTGGCGGTGGATCCGGA | 619 | SGGGSG | 620 |
| ΔCaspase9 | GTCGACGGATTTGGTGATGT | 621 | VDGFGDVGALESLRGNADLAYILSME | 622 |
| | CGGTGCTCTTGAGAGTTTGA | | PCGHCLIINNVNFCRESGLRTRTGSNI | |
| | GGGGAAATGCAGATTTGGCT | | DCEKLRRRFSSLHFMVEVKGDLTAKK | |
| | TACATCCTGAGCATGGAGCC | | MVLALLELARQDHGALDCCVVVILSH | |
| | CTGTGGCCACTGCCTCATTA | | GCQASHLQFPGAVYGTDGCPVSVEKI | |
| | TCAACAATGTGAACTTCTGCC | | VNIFNGTSCPSLGGKPKLFFIQACGGE | |
| | GTGAGTCCGGGCTCCGCACC | | QKDHGFEVASTSPEDESPGSNPEPD | |
| | CGCACTGGCTCCAACATCGA | | ATPFQEGLRTFDQLDAISSLPTPSDIF | |
| | CTGTGAGAAGTTGCGGCGTC | | VSYSTFPGFVSWRDPKSGSWYVETL | |
| | GCTTCTCCTCGCTGCATTTCA | | DDIFEQWAHSEDLQSLLLRVANAVSV | |
| | TGGTGGAGGTGAAGGGCGA | | KGIYKQMPGCFNFLRKKLFFKTSASRA | |
| | CCTGACTGCCAAGAAAATGG | | | |
| | TGCTGGCTTTGCTGGAGCTG | | | |
| | GCGCGGCAGGACCACGGTG | | | |
| | CTCTGGACTGCTGCGTGGTG | | | |
| | GTCATTCTCTCTCACGGCTGT | | | |
| | CAGGCCAGCCACCTGCAGTT | | | |
| | CCCAGGGGCTGTCTACGGCA | | | |
| | CAGATGGATGCCCTGTGTCG | | | |
| | GTCGAGAAGATTGTGAACAT | | | |
| | CTTCAATGGGACCAGCTGCC | | | |
| | CCAGCCTGGGAGGGAAGCC | | | |
| | CAAGCTCTTTTTCATCCAGGC | | | |
| | CTGTGGTGGGGAGCAGAAAG | | | |
| | ACCATGGGTTTGAGGTGGCC | | | |
| | TCCACTTCCCCTGAAGACGA | | | |
| | GTCCCCTGGCAGTAACCCCG | | | |
| | AGCCAGATGCCACCCCGTTC | | | |
| | CAGGAAGGTTTGAGGACCTT | | | |
| | CGACCAGCTGGACGCCATAT | | | |
| | CTAGTTTGCCCACACCCAGT | | | |
| | GACATCTTTGTGTCCTACTCT | | | |
| | ACTTTCCCAGGTTTTGTTTCC | | | |
| | TGGAGGGACCCCAAGAGTG | | | |
| | GCTCCTGGTACGTTGAGACC | | | |
| | CTGGACGACATCTTTGAGCA | | | |
| | GTGGGCTCACTCTGAAGACC | | | |
| | TGCAGTCCCTCCTGCTTAGG | | | |
| | GTCGCTAATGCTGTTTCGGT | | | |
| | GAAAGGGATTTATAAACAGAT | | | |
| | GCCTGGTTGCTTTAATTTCCT | | | |
| | CCGGAAAAAACTTTTCTTTAA | | | |
| | AACATCAGCTAGCAGAGCC | | | |
| T2A | GAGGGCAGGGGAAGTCTTCT | 623 | EGRGSLLTCGDVEENPGP | 624 |
| | AACATGCGGGGACGTGGAG | | | |
| | GAAAATCCCGGGCCC | | | |
| ΔCD19 | ATGCCACCTCCTCGCCTCCT | 625 | MPPPRLLFFLLFLTPMEVRPEEPLVVK | 626 |
| | CTTCTTCCTCCTCTTCCTCAC | | VEEGDNAVLQCLKGTSDGPTQQLTW | |
| | CCCCATGGAAGTCAGGCCCG | | SRESPLKPFLKLSLGLPGLGIHMRPLAI | |
| | AGGAACCTCTAGTGGTGAAG | | WLFIFNVSQQMGGFYLCQPGPPSEK | |
| | GTGGAAGAGGGAGATAACGC | | AWQPGWTVNVEGSGELFRWNVSDL | |
| | TGTGCTGCAGTGCCTCAAGG | | GGLGCGLKNRSSEGPSSPSGKLMSP | |
| | GGACCTCAGATGGCCCCACT | | KLYVWAKDRPEIWEGEPPCLPPRDSL | |
| | CAGCAGCTGACCTGGTCTCG | | NQSLSQDLTMAPGSTLWLSCGVPPD | |
| | GGAGTCCCCGCTTAAACCCT | | SVSRGPLSWTHVHPKGPKSLLSLELK | |
| | TCTTAAAACTCAGCCTGGGG | | DDRPARDMWVMETGLLLPRATAQDA | |
| | CTGCCAGGCCTGGGAATCCA | | GKYYCHRGNLTMSFHLEITARPVLWH | |
| | CATGAGGCCCCTGGCCATCT | | WLLRTGGWKVSAVTLAYLIFCLCSLV | |
| | GGCTTTTCATCTTCAACGTCT | | GILHLQRALVLRRKRKRMTDPTRRF | |
| | CTCAACAGATGGGGGGCTTC | | | |
| | TACCTGTGCCAGCCGGGGCC | | | |
| | CCCCTCTGAGAAGGCCTGGC | | | |
| | AGCCTGGCTGGACAGTCAAT | | | |
| | GTGGAGGGCAGCGGGGAGC | | | |
| | TGTTCCGGTGGAATGTTTCG | | | |
| | GACCTAGGTGGCCTGGGCTG | | | |
| | TGGCCTGAAGAACAGGTCCT | | | |
| | CAGAGGGCCCCAGCTCCCCT | | | |
| | TCCGGGAAGCTCATGAGCCC | | | |
| | CAAGCTGTATGTGTGGGCCA | | | |
| | AAGACCGCCCTGAGATCTGG | | | |
| | GAGGGAGAGCCTCCGTGTCT | | | |
| | CCCACCGAGGGACAGCCTGA | | | |
| | ACCAGAGCCTCAGCCAGGAC | | | |
| | CTCACCATGGCCCCTGGCTC | | | |
| | CACACTCTGGCTGTCCTGTG | | | |
| | GGGTACCCCCTGACTCTGTG | | | |
| | TCCAGGGGCCCCCTCTCCTG | | | |
| | GACCCATGTGCACCCCAAGG | | | |
| | GGCCTAAGTCATTGCTGAGC | | | |
| | CTAGAGCTGAAGGACGATCG | | | |
| | CCCGGCCAGAGATATGTGGG | | | |
| | TAATGGAGACGGGTCTGTTG | | | |
| | TTGCCCCGGGCCACAGCTCA | | | |
| | AGACGCTGGAAAGTATTATT | | | |
| | GTCACCGTGGCAACCTGACC | | | |
| | ATGTCATTCCACCTGGAGAT | | | |
| | CACTGCTCGGCCAGTACTAT | | | |
| | GGCACTGGCTGCTGAGGACT | | | |
| | GGTGGCTGGAAGGTCTCAGC | | | |
| | TGTGACTTTGGCTTATCTGAT | | | |
| | CTTCTGCCTGTGTTCCCTTGT | | | |
| | GGGCATTCTTCATCTTCAAAG | | | |
| | AGCCCTGGTCCTGAGGAGGA | | | |
| | AAAGAAAGCGAATGACTGAC | | | |
| | CCCACCAGGAGATTC | | | |
| GSG-linker | GGGAGTGGG | 627 | GSG | 628 |
| P2A | GCTACGAATTTTAGCTTGCTG | 629 | ATNFSLLKQAGDVEENPGP | 630 |
| | AAGCAGGCCGGTGATGTGGA | | | |
| | AGAGAACCCCGGGCCT | | | |
| FRBI | TGGCATGAAGGTCTGGAAGA | 631 | WHEGLEEASRLYFGERNVKGMFEVL | 632 |
| | AGCTTCTCGCCTTTATTTTGG | | EPLHAMMERGPQTLKETSFNQAYGR | |
| | CGAACGGAACGTAAAAGGTA | | DLMEAQEWCRKYMKSGNVKDLLQA | |
| | TGTTTGAAGTCCTGGAGCCA | | WDLYYHVFRRISK | |
| | TTGCACGCCATGATGGAGCG | | | |
| | CGGGCCTCAGACCCTCAAGG | | | |
| | AAACCAGTTTTAATCAGGCCT | | | |
| | ATGGGCGAGACCTCATGGAG | | | |
| | GCACAGGAATGGTGTCGGAA | | | |
| | GTATATGAAGTCCGGCAACG | | | |
| | TTAAGGATCTCTTGCAGGCC | | | |
| | TGGGACTTGTATTATCACGTG | | | |
| | TTCCGGCGAATCAGCAAG | | | |
| Linker | Cgtacg | 633 | RT | 634 |
| FRBI″ | TGGCACGAAGGTTTGGAAGA | 635 | WHEGLEEASRLYFGERNVKGMFEVL | 636 |
| | GGCCTCCCGCCTGTATTTCG | | EPLHAMMERGPQTLKETSFNQAYGR | |
| | GTGAGAGAAATGTCAAAGGT | | DLMEAQEWCRKYMKSGNVKDLLQA | |
| | ATGTTTGAAGTGCTTGAGCC | | WDLYYHVFRRISK* | |
| | CCTGCACGCCATGATGGAAC | | | |
| | GGGGGCCGCAGACTCTGAAA | | | |
| | GAAACCTCATTCAACCAGGC | | | |
| | ATACGGGCGAGACCTGATGG | | | |
| | AAGCGCAGGAATGGTGTAGG | | | |
| | AAGTACATGAAGTCCGGAAA | | | |
| | TGTGAAGGACTTGCTCCAGG | | | |
| | CTTGGGACCTGTACTATCAC | | | |
| | GTATTTCGGAGAATAAGCAA | | | |
| | G-TAA | | | |

pBP0757--pSFG-iC9.T2A-dCD19.P2A-FRBₗ3

| | | | | SEQ ID |
|---|---|---|---|---|
| Fragment | Nucleotide | SEQ ID NO: | Peptide | NO: |
| FKBP12v36 | ATGCTCGAGGGAGTGCAGGT | 637 | MLEGVQVETISPGDGRTFPKRGQTCV | 638 |
| | GGAGACTATCTCCCCAGGAG | | VHYTGMLEDGKKVDSSRDRNKPFKF | |
| | ACGGGCGCACCTTCCCCAAG | | MLGKQEVIRGWEEGVAQMSVGQRAK | |
| | CGCGGCCAGACCTGCGTGG | | LTISPDYAYGATGHPGIIPPHATLVFDV | |
| | TGCACTACACCGGGATGCTT | | ELLKLE | |
| | GAAGATGGAAAGAAAGTTGA | | | |
| | TTCCTCCCGGGACAGAAACA | | | |
| | AGCCCTTTAAGTTTATGCTAG | | | |
| | GCAAGCAGGAGGTGATCCGA | | | |
| | GGCTGGGAAGAAGGGGTTG | | | |
| | CCCAGATGAGTGTGGGTCAG | | | |
| | AGAGCCAAACTGACTATATCT | | | |
| | CCAGATTATGCCTATGGTGC | | | |
| | CACTGGGCACCCAGGCATCA | | | |
| | TCCCACCACATGCCACTCTC | | | |
| | GTCTTCGATGTGGAGCTTCT | | | |
| | AAAACTGGAA | | | |
| Linker | TCTGGCGGTGGATCCGGA | 639 | SGGGSG | 640 |
| ΔCaspase9 | GTCGACGGATTTGGTGATGT | 641 | VDGFGDVGALESLRGNADLAYILSME | 642 |
| | CGGTGCTCTTGAGAGTTTGA | | PCGHCLIINNVNFCRESGLRTRTGSNI | |
| | GGGGAAATGCAGATTTGGCT | | DCEKLRRRFSSLHFMVEVKGDLTAKK | |
| | TACATCCTGAGCATGGAGCC | | MVLALLELARQDHGALDCCVVVILSH | |
| | CTGTGGCCACTGCCTCATTA | | GCQASHLQFPGAVYGTDGCPVSVEKI | |
| | TCAACAATGTGAACTTCTGCC | | VNIFNGTSCPSLGGKPKLFFIQACGGE | |
| | GTGAGTCCGGGCTCCGCACC | | QKDHGFEVASTSPEDESPGSNPEPD | |
| | CGCACTGGCTCCAACATCGA | | ATPFQEGLRTFDQLDAISSLPTPSDIF | |
| | CTGTGAGAAGTTGCGGCGTC | | VSYSTFPGFVSWRDPKSGSWYVETL | |
| | GCTTCTCCTCGCTGCATTTCA | | DDIFEQWAHSEDLQSLLLRVANAVSV | |
| | TGGTGGAGGTGAAGGGCGA | | KGIYKQMPGCFNFLRKKLFFKTSASRA | |
| | CCTGACTGCCAAGAAAATGG | | | |
| | TGCTGGCTTTGCTGGAGCTG | | | |
| | GCGCGGCAGGACCACGGTG | | | |
| | CTCTGGACTGCTGCGTGGTG | | | |
| | GTCATTCTCTCTCACGGCTGT | | | |
| | CAGGCCAGCCACCTGCAGTT | | | |
| | CCCAGGGGCTGTCTACGGCA | | | |
| | CAGATGGATGCCCTGTGTCG | | | |
| | GTCGAGAAGATTGTGAACAT | | | |
| | CTTCAATGGGACCAGCTGCC | | | |
| | CCAGCCTGGGAGGGAAGCC | | | |
| | CAAGCTCTTTTTCATCCAGGC | | | |
| | CTGTGGTGGGGAGCAGAAAG | | | |
| | ACCATGGGTTTGAGGTGGCC | | | |
| | TCCACTTCCCCTGAAGACGA | | | |
| | GTCCCCTGGCAGTAACCCCG | | | |
| | AGCCAGATGCCACCCCGTTC | | | |
| | CAGGAAGGTTTGAGGACCTT | | | |
| | CGACCAGCTGGACGCCATAT | | | |
| | CTAGTTTGCCCACACCCAGT | | | |
| | GACATCTTTGTGTCCTACTCT | | | |
| | ACTTTCCCAGGTTTTGTTTCC | | | |
| | TGGAGGGACCCCAAGAGTG | | | |
| | GCTCCTGGTACGTTGAGACC | | | |
| | CTGGACGACATCTTTGAGCA | | | |
| | GTGGGCTCACTCTGAAGACC | | | |
| | TGCAGTCCCTCCTGCTTAGG | | | |
| | GTCGCTAATGCTGTTTCGGT | | | |
| | GAAAGGGATTTATAAACAGAT | | | |
| | GCCTGGTTGCTTTAATTTCCT | | | |
| | CCGGAAAAAACTTTTCTTTAA | | | |
| | AACATCAGCTAGCAGAGCC | | | |
| T2A | GAGGGCAGGGGAAGTCTTCT | 643 | EGRGSLLTCGDVEENPGP | 644 |
| | AACATGCGGGGACGTGGAG | | | |
| | GAAAATCCCGGGCCC | | | |
| ΔCD19 | ATGCCACCTCCTCGCCTCCT | 645 | MPPPRLLFFLLFLTPMEVRPEEPLVVK | 646 |
| | CTTCTTCCTCCTCTTCCTCAC | | VEEGDNAVLQCLKGTSDGPTQQLTW | |
| | CCCCATGGAAGTCAGGCCCG | | SRESPLKPFLKLSLGLPGLGIHMRPLAI | |
| | AGGAACCTCTAGTGGTGAAG | | WLFIFNVSQQMGGFYLCQPGPPSEK | |
| | GTGGAAGAGGGAGATAACGC | | AWQPGWTVNVEGSGELFRWNVSDL | |
| | TGTGCTGCAGTGCCTCAAGG | | GGLGCGLKNRSSEGPSSPSGKLMSP | |
| | GGACCTCAGATGGCCCCACT | | KLYVWAKDRPEIWEGEPPCLPPRDSL | |
| | CAGCAGCTGACCTGGTCTCG | | NQSLSQDLTMAPGSTLWLSCGVPPD | |
| | GGAGTCCCCGCTTAAACCCT | | SVSRGPLSWTHVHPKGPKSLLSLELK | |
| | TCTTAAAACTCAGCCTGGGG | | DDRPARDMWVMETGLLLPRATAQDA | |
| | CTGCCAGGCCTGGGAATCCA | | GKYYCHRGNLTMSFHLEITARPVLWH | |
| | CATGAGGCCCCTGGCCATCT | | WLLRTGGWKVSAVTLAYLIFCLCSLV | |
| | GGCTTTTCATCTTCAACGTCT | | GILHLQRALVLRRKRKRMTDPTRRF | |
| | CTCAACAGATGGGGGGCTTC | | | |
| | TACCTGTGCCAGCCGGGGCC | | | |
| | CCCCTCTGAGAAGGCCTGGC | | | |
| | AGCCTGGCTGGACAGTCAAT | | | |
| | GTGGAGGGCAGCGGGGAGC | | | |
| | TGTTCCGGTGGAATGTTTCG | | | |
| | GACCTAGGTGGCCTGGGCTG | | | |
| | TGGCCTGAAGAACAGGTCCT | | | |
| | CAGAGGGCCCCAGCTCCCCT | | | |
| | TCCGGGAAGCTCATGAGCCC | | | |
| | CAAGCTGTATGTGTGGGCCA | | | |
| | AAGACCGCCCTGAGATCTGG | | | |
| | GAGGGAGAGCCTCCGTGTCT | | | |
| | CCCACCGAGGGACAGCCTGA | | | |
| | ACCAGAGCCTCAGCCAGGAC | | | |
| | CTCACCATGGCCCCTGGCTC | | | |
| | CACACTCTGGCTGTCCTGTG | | | |
| | GGGTACCCCCTGACTCTGTG | | | |
| | TCCAGGGGCCCCCTCTCCTG | | | |
| | GACCCATGTGCACCCCAAGG | | | |
| | GGCCTAAGTCATTGCTGAGC | | | |
| | CTAGAGCTGAAGGACGATCG | | | |
| | CCCGGCCAGAGATATGTGGG | | | |
| | TAATGGAGACGGGTCTGTTG | | | |
| | TTGCCCCGGGCCACAGCTCA | | | |
| | AGACGCTGGAAAGTATTATT | | | |
| | GTCACCGTGGCAACCTGACC | | | |
| | ATGTCATTCCACCTGGAGAT | | | |
| | CACTGCTCGGCCAGTACTAT | | | |
| | GGCACTGGCTGCTGAGGACT | | | |
| | GGTGGCTGGAAGGTCTCAGC | | | |
| | TGTGACTTTGGCTTATCTGAT | | | |
| | CTTCTGCCTGTGTTCCCTTGT | | | |
| | GGGCATTCTTCATCTTCAAAG | | | |
| | AGCCCTGGTCCTGAGGAGGA | | | |
| | AAAGAAAGCGAATGACTGAC | | | |
| | CCCACCAGGAGATTC | | | |
| GSG (linker) | GGGAGTGGG | 647 | GSG | 648 |
| P2A | GCTACGAATTTTAGCTTGCTG | 649 | ATNFSLLKQAGDVEENPGP | 650 |
| | AAGCAGGCCGGTGATGTGGA | | | |
| | AGAGAACCCCGGGCCT | | | |
| FRBI | TGGCATGAAGGTCTGGAAGA | 651 | WHEGLEEASRLYFGERNVKGMFEVL | 652 |
| | AGCTTCTCGCCTTTATTTTGG | | EPLHAMMERGPQTLKETSFNQAYGR | |
| | CGAACGGAACGTAAAAGGTA | | DLMEAQEWCRKYMKSGNVKDLLQA | |
| | TGTTTGAAGTCCTGGAGCCA | | WDLYYHVFRRISK | |
| | TTGCACGCCATGATGGAGCG | | | |
| | CGGGCCTCAGACCCTCAAGG | | | |
| | AAACCAGTTTTAATCAGGCCT | | | |
| | ATGGGCGAGACCTCATGGAG | | | |
| | GCACAGGAATGGTGTCGGAA | | | |
| | GTATATGAAGTCCGGCAACG | | | |
| | TTAAGGATCTCTTGCAGGCC | | | |
| | TGGGACTTGTATTATCACGTG | | | |
| | TTCCGGCGAATCAGCAAG | | | |
| Linker | Cgtacg | 653 | RT | 654 |
| FRBI′ | TGGCAcGAAGGTCTgGAcGAG | 655 | WHEGLDEASRLYFGERNVKGMFEVL | 656 |
| | GCTAGTAGACTGTATTTCGG | | EPLHAMMERGPQTLKETSFNQAYGR | |
| | CGAGAGAAATGTAAAGGGAA | | DLMEAQEWCRKYMKSGNVKDLLQA | |
| | TGTTCGAGGTACTGGAGCCT | | WDLYYHVFRRISK | |
| | CTGCACGCCATGATGGAACG | | | |
| | CGGCCCTCAGACACTCAAGG | | | |
| | AGACTAGTTTTAACCAGGCCT | | | |
| | ATGGCAGGGATCTGATGGAG | | | |
| | GCTCAGGAATGGTGCCGGAA | | | |
| | GTAtATGAAAAGCGGTAACGT | | | |
| | GAAGGACCTGCTGCAGGCCT | | | |
| | GGGATCTGTATTATCACGTGT | | | |
| | TTAGAAGAATCTCTAAA | | | |
| Linker | Cgtacg | 657 | RT | 658 |
| FRBI″ | TGGCACGAAGGTTTGGAAGA | 659 | WHEGLEEASRLYFGERNVKGMFEVL | 660 |
| | GGCCTCCCGCCTGTATTTCG | | EPLHAMMERGPQTLKETSFNQAYGR | |
| | GTGAGAGAAATGTCAAAGGT | | DLMEAQEWCRKYMKSGNVKDLLQA | |
| | ATGTTTGAAGTGCTTGAGCC | | WDLYYHVFRRISK* | |
| | CCTGCACGCCATGATGGAAC | | | |
| | GGGGGCCGCAGACTCTGAAA | | | |
| | GAAACCTCATTCAACCAGGC | | | |
| | ATACGGGCGAGACCTGATGG | | | |
| | AAGCGCAGGAATGGTGTAGG | | | |
| | AAGTACATGAAGTCCGGAAA | | | |
| | TGTGAAGGACTTGCTCCAGG | | | |
| | CTTGGGACCTGTACTATCAC | | | |
| | GTATTTCGGAGAATAAGCAA | | | |
| | G-TAA | | | |

pBP0655--pSFG-ΔMyr.FRBₗ.MC.2A-ΔCD19

| | | | | SEQ ID |
|---|---|---|---|---|
| Fragment | Nucleotide | SEQ ID NO: | Peptide | NO: |
| FRBₗ′ | TGGCACGAGGGGCTGGAGG | 661 | WHEGLEEASRLYFGERNVKGMFEVL | 662 |
| | AGGCAAGTCGACTGTATTTT | | EPLHAMMERGPQTLKETSFNQAYGR | |
| | GGAGAACGCAACGTAAAGGG | | DLMEAQEWCRKYMKSGNVKDLLQA | |
| | AATGTTTGAGGTGCTCGAAC | | WDLYYHVFRRISK | |
| | CACTCCATGCTATGATGGAA | | | |
| | AGGGGGCCTCAGACTCTTAA | | | |
| | GGAAACAAGTTTTAATCAAGC | | | |
| | CTACGGACGAGACCTCATGG | | | |
| | AGGCGCAGGAGTGGTGCAG | | | |
| | AAAATACATGAAATCAGGTAA | | | |
| | TGTTAAGGACCTGCTGCAGG | | | |
| | CATGGGACCTGTACTACCAT | | | |
| | GTCTTCAGGCGCATCTCAAAG | | | |
| Linker | ATGCATTCTGGTGGAGGATC | 663 | MHSGGGSGVE | 664 |
| | AGGCGTTGAA | | | |
| MyD88L | GCAGCTGGAGGCCCTGGCG | 665 | AAGGPGAGSAAPVSSTSSLPLAALN | 666 |
| | CAGGCTCTGCAGCCCCTGTA | | MRVRRRLSLFLNVRTQVAADWTALA | |
| | TCTAGCACCTCTTCTCTTCCT | | EEMDFEYLEIRQLETQADPTGRLLDA | |
| | CTGGCTGCGCTGAACATGAG | | WQGRPGASVGRLLDLLTKLGRDDVL | |
| | AGTGCGGAGACGGTTGTCTT | | LELGPSIEEDCQKYILKQQQEEAEKPL | |
| | TGTTCTTGAATGTCAGAACAC | | QVAAVDSSVPRTAELAGITTLDDPLG | |
| | AGGTTGCAGCGGACTGGACC | | HMPERFDAFICYCPSDI | |
| | GCTCTGGCCGAGGAAATGGA | | | |
| | CTTCGAGTACCTGGAGATCA | | | |
| | GGCAACTCGAAACGCAGGCA | | | |
| | GATCCTACAGGCAGACTGTT | | | |
| | GGATGCGTGGCAGGGACGG | | | |
| | CCCGGAGCCAGCGTTGGAC | | | |
| | GGCTCCTTGATCTTCTCACCA | | | |
| | AGCTGGGCAGAGATGACGTG | | | |
| | CTGCTGGAATTGGGCCCCAG | | | |
| | TATTGAGGAGGACTGCCAAA | | | |
| | AATACATCTTGAAGCAGCAAC | | | |
| | AGGAGGAGGCGGAGAAGCC | | | |
| | CCTCCAGGTCGCAGCCGTCG | | | |
| | ATTCATCCGTGCCTAGAACA | | | |
| | GCCGAACTTGCAGGCATCAC | | | |
| | TACCCTGGATGATCCCCTGG | | | |
| | GCCATATGCCAGAGAGGTTT | | | |
| | GATGCGTTTATCTGCTATTGC | | | |
| | CCAAGCGATATC | | | |
| Linker | GTTGAG | 667 | VE | 668 |
| hCD40 | AAGAAGGTGGCCAAGAAGCC | 669 | KKVAKKPTNKAPHPKQEPQEINFPDD | 670 |
| | AACCAATAAAGCTCCACATCC | | LPGSNTAAPVQETLHGCQPVTQEDG | |
| | TAAACAGGAGCCACAAGAAA | | KESRISVQERQ | |
| | TCAACTTTCCAGATGATCTCC | | | |
| | CTGGCTCTAATACTGCAGCC | | | |
| | CCCGTGCAGGAAACCCTGCA | | | |
| | CGGCTGTCAACCTGTGACAC | | | |
| | AGGAAGACGGGAAGGAAAG | | | |
| | CAGGATATCCGTGCAGGAAC | | | |
| | GGCAA | | | |
| Linker | GTCGAC | 671 | VD | 672 |
| HA epitope | TACCCATACGACGTGCCAGA | 673 | YPYDVPDYA | 674 |
| | TTATGCT | | | |
| Linker | CCGCGG | 675 | PR | 676 |
| T2A | GAAGGCCGAGGGAGCCTGC | 677 | EGRGSLLTCGDVEENPGP | 678 |
| | TGACATGTGGCGATGTGGAG | | | |
| | GAAAACCCAGGACCA | | | |
| ΔCD19 | ATGCCACCACCTCGCCTGCT | 679 | MPPPRLLFFLLFLTPMEVRPEEPLVV | 680 |
| | GTTCTTTCTGCTGTTCCTGAC | | KVEEGDNAVLQCLKGTSDGPTQQLT | |
| | ACCTATGGAGGTGCGACCTG | | WSRESPLKPFLKLSLGLPGLGIHMRP | |
| | AGGAACCACTGGTCGTGAAG | | LAIWLFIFNVSQQMGGFYLCQPGPPS | |
| | GTCGAGGAAGGCGACAATGC | | EKAWQPGWTVNVEGSGELFRWNVS | |
| | CGTGCTGCAGTGCCTGAAAG | | DLGGLGCGLKNRSSEGPSSPSGKLM | |
| | GCACTTCTGATGGGCCAACT | | SPKLYVWAKDRPEIWEGEPPCLPPR | |
| | CAGCAGCTGACCTGGTCCAG | | DSLNQSLSQDLTMAPGSTLWLSCGV | |
| | GGAGTCTCCCCTGAAGCCTT | | PPDSVSRGPLSWTHVHPKGPKSLLS | |
| | TTCTGAAACTGAGCCTGGGA | | LELKDDRPARDMWVMETGLLLPRAT | |
| | CTGCCAGGACTGGGAATCCA | | AQDAGKYYCHRGNLTMSFHLEITARP | |
| | CATGCGCCCTCTGGCTATCT | | VLWHWLLRTGGWKVSAVTLAYLIFCL | |
| | GGCTGTTCATCTTCAACGTG | | CSLVGILHLQRALVLRRKRKRMTDPT | |
| | AGCCAGCAGATGGGAGGATT | | RRF* | |
| | CTACCTGTGCCAGCCAGGAC | | | |
| | CACCATCCGAGAAGGCCTGG | | | |
| | CAGCCTGGATGGACCGTCAA | | | |
| | CGTGGAGGGGTCTGGAGAA | | | |
| | CTGTTTAGGTGGAATGTGAG | | | |
| | TGACCTGGGAGGACTGGGAT | | | |
| | GTGGGCTGAAGAACCGCTCC | | | |
| | TCTGAAGGCCCAAGTTCACC | | | |
| | CTCAGGGAAGCTGATGAGCC | | | |
| | CAAAACTGTACGTGTGGGCC | | | |
| | AAAGATCGGCCCGAGATCTG | | | |
| | GGAGGGAGAACCTCCATGCC | | | |
| | TGCCACCTAGAGACAGCCTG | | | |
| | AATCAGAGTCTGTCACAGGA | | | |
| | TCTGACAATGGCCCCCGGGT | | | |
| | CCACTCTGTGGCTGTCTTGT | | | |
| | GGAGTCCCACCCGACAGCGT | | | |
| | GTCCAGAGGCCCTCTGTCCT | | | |
| | GGACCCACGTGCATCCTAAG | | | |
| | GGGCCAAAAAGTCTGCTGTC | | | |
| | ACTGGAACTGAAGGACGATC | | | |
| | GGCCTGCCAGAGACATGTGG | | | |
| | GTCATGGAGACTGGACTGCT | | | |
| | GCTGCCACGAGCAACCGCAC | | | |
| | AGGATGCTGGAAAATACTATT | | | |
| | GCCACCGGGGCAATCTGACA | | | |
| | ATGTCCTTCCATCTGGAGATC | | | |
| | ACTGCAAGGCCCGTGCTGTG | | | |
| | GCACTGGCTGCTGCGAACCG | | | |
| | GAGGATGGAAGGTCAGTGCT | | | |
| | GTGACACTGGCATATCTGAT | | | |
| | CTTTTGCCTGTGCTCCCTGG | | | |
| | TGGGCATTCTGCATCTGCAG | | | |
| | AGAGCCCTGGTGCTGCGGA | | | |
| | GAAAGAGAAAGAGAATGACT | | | |
| | GACCCAACAAGAAGGTTTTGA | | | |

pBP0498--pSFG-ΔMyr.iMC.FRBₗ2.P2A-ΔCD19

| | | | | SEQ ID |
|---|---|---|---|---|
| Fragment | Nucleotide | SEQ ID NO: | Peptide | NO: |
| Start | ATGCTCGAG | 681 | MLE | 682 |
| FRBₗ\hat{ } | TGGCACGAGGGGCTGGAGG | 683 | WHEGLEEASRLYFGERNVKGMFE | 684 |
| | AGGCAAGTCGACTGTATTTT | | VLEPLHAMMERGPQTLKETSFNQA | |
| | GGAGAACGCAACGTAAAGGG | | YGRDLMEAQEWCRKYMKSGNVKD | |
| | AATGTTTGAGGTGCTCGAAC | | LLQAWDLYYHVFRRISK | |
| | CACTCCATGCTATGATGGAA | | | |
| | AGGGGGCCTCAGACTCTTAA | | | |
| | GGAAACAAGTTTTAATCAAGC | | | |
| | CTACGGACGAGACCTCATGG | | | |
| | AGGCGCAGGAGTGGTGCAG | | | |
| | AAAATACATGAAATCAGGTAA | | | |
| | TGTTAAGGACCTGCTGCAGG | | | |
| | CATGGGACCTGTACTACCAT | | | |
| | GTCTTCAGGCGCATCTCAAAG | | | |
| Linker | ATGCAT | 685 | MH | 686 |
| FRBₗ\hat{ }\hat{ } | TGGCACGAAGGCCTGGAAGA | 687 | WHEGLEEASRLYFGERNVKGMFE | 688 |
| | GGCCTCAAGACTTTACTTTG | | VLEPLHAMMERGPQTLKETSFNQA | |
| | GTGAACGCAACGTTAAAGGC | | YGRDLMEAQEWCRKYMKSGNVKD | |
| | ATGTTCGAGGTGCTGGAACC | | LLQAWDLYYHVFRRISK | |
| | CTTGCATGCAATGATGGAGC | | | |
| | GAGGTCCTCAGACACTCAAA | | | |
| | GAGACATCTTTTAACCAGGC | | | |
| | GTATGGACGGGACCTCATGG | | | |
| | AGGCTCAGGAATGGTGCCGC | | | |
| | AAGTACATGAAAAGTGGGAA | | | |
| | TGTGAAGGATCTGCTGCAAG | | | |
| | CATGGGATCTGTATTACCAC | | | |
| | GTGTTTAGACGGATCAGCAAA | | | |
| Linker | ATGCATTCTGGTGGAGGATC | 689 | MHSGGGSGVE | 690 |
| | AGGCGTTGAA | | | |
| MyD88L | GCAGCTGGAGGCCCTGGCG | 691 | AAGGPGAGSAAPVSSTSSLPLAAL | 692 |
| | CAGGCTCTGCAGCCCCTGTA | | NMRVRRRLSLFLNVRTQVAADWTA | |
| | TCTAGCACCTCTTCTCTTCCT | | LAEEMDFEYLEIRQLETQADPTGRL | |
| | CTGGCTGCGCTGAACATGAG | | LDAWQGRPGASVGRLLDLLTKLGR | |
| | AGTGCGGAGACGGTTGTCTT | | DDVLLELGPSIEEDCQKYILKQQQE | |
| | TGTTCTTGAATGTCAGAACAC | | EAEKPLQVAAVDSSVPRTAELAGIT | |
| | AGGTTGCAGCGGACTGGACC | | TLDDPLGHMPERFDAFICYCPSDI | |
| | GCTCTGGCCGAGGAAATGGA | | | |
| | CTTCGAGTACCTGGAGATCA | | | |
| | GGCAACTCGAAACGCAGGCA | | | |
| | GATCCTACAGGCAGACTGTT | | | |
| | GGATGCGTGGCAGGGACGG | | | |
| | CCCGGAGCCAGCGTTGGAC | | | |
| | GGCTCCTTGATCTTCTCACCA | | | |
| | AGCTGGGCAGAGATGACGTG | | | |
| | CTGCTGGAATTGGGCCCCAG | | | |
| | TATTGAGGAGGACTGCCAAA | | | |
| | AATACATCTTGAAGCAGCAAC | | | |
| | AGGAGGAGGCGGAGAAGCC | | | |
| | CCTCCAGGTCGCAGCCGTCG | | | |
| | ATTCATCCGTGCCTAGAACA | | | |
| | GCCGAACTTGCAGGCATCAC | | | |
| | TACCCTGGATGATCCCCTGG | | | |
| | GCCATATGCCAGAGAGGTTT | | | |
| | GATGCGTTTATCTGCTATTGC | | | |
| | CCAAGCGATATC | | | |
| Linker | GTTGAG | 693 | VE | 694 |
| hCD40 | AAGAAGGTGGCCAAGAAGCC | 695 | KKVAKKPTNKAPHPKQEPQEINFPD | 696 |
| | AACCAATAAAGCTCCACATCC | | DLPGSNTAAPVQETLHGCQPVTQE | |
| | TAAACAGGAGCCACAAGAAA | | DGKESRISVQERQ | |
| | TCAACTTTCCAGATGATCTCC | | | |
| | CTGGCTCTAATACTGCAGCC | | | |
| | CCCGTGCAGGAAACCCTGCA | | | |
| | CGGCTGTCAACCTGTGACAC | | | |
| | AGGAAGACGGGAAGGAAAG | | | |
| | CAGGATATCCGTGCAGGAAC | | | |
| | GGCAA | | | |
| Linker | GTCGAC | 697 | VD | 698 |
| HA | TACCCATACGACGTGCCAGA | 699 | YPYDVPDYA | 700 |
| | TTATGCT | | | |
| Linker | CCGCGG | 701 | PR | 702 |
| T2A | GAAGGCCGAGGGAGCCTGC | 703 | EGRGSLLTCGDVEENPGP | 704 |
| | TGACATGTGGCGATGTGGAG | | | |
| | GAAAACCCAGGACCA | | | |
| ΔCD19 | ATGCCACCACCTCGCCTGCT | 705 | MPPPRLLFFLLFLTPMEVRPEEPLV | 706 |
| | GTTCTTTCTGCTGTTCCTGAC | | VKVEEGDNAVLQCLKGTSDGPTQQ | |
| | ACCTATGGAGGTGCGACCTG | | LTWSRESPLKPFLKLSLGLPGLGIH | |
| | AGGAACCACTGGTCGTGAAG | | MRPLAIWLFIFNVSQQMGGFYLCQ | |
| | GTCGAGGAAGGCGACAATGC | | PGPPSEKAWQPGWTVNVEGSGEL | |
| | CGTGCTGCAGTGCCTGAAAG | | FRWNVSDLGGLGCGLKNRSSEGP | |
| | GCACTTCTGATGGGCCAACT | | SSPSGKLMSPKLYVWAKDRPEIWE | |
| | CAGCAGCTGACCTGGTCCAG | | GEPPCLPPRDSLNQSLSQDLTMAP | |
| | GGAGTCTCCCCTGAAGCCTT | | GSTLWLSCGVPPDSVSRGPLSWT | |
| | TTCTGAAACTGAGCCTGGGA | | HVHPKGPKSLLSLELKDDRPARDM | |
| | CTGCCAGGACTGGGAATCCA | | WVMETGLLLPRATAQDAGKYYCHR | |
| | CATGCGCCCTCTGGCTATCT | | GNLTMSFHLEITARPVLWHWLLRT | |
| | GGCTGTTCATCTTCAACGTG | | GGWKVSAVTLAYLIFCLCSLVGILHL | |
| | AGCCAGCAGATGGGAGGATT | | QRALVLRRKRKRMTDPTRRF* | |
| | CTACCTGTGCCAGCCAGGAC | | | |
| | CACCATCCGAGAAGGCCTGG | | | |
| | CAGCCTGGATGGACCGTCAA | | | |
| | CGTGGAGGGGTCTGGAGAA | | | |
| | CTGTTTAGGTGGAATGTGAG | | | |
| | TGACCTGGGAGGACTGGGAT | | | |
| | GTGGGCTGAAGAACCGCTCC | | | |
| | TCTGAAGGCCCAAGTTCACC | | | |
| | CTCAGGGAAGCTGATGAGCC | | | |
| | CAAAACTGTACGTGTGGGCC | | | |
| | AAAGATCGGCCCGAGATCTG | | | |
| | GGAGGGAGAACCTCCATGCC | | | |
| | TGCCACCTAGAGACAGCCTG | | | |
| | AATCAGAGTCTGTCACAGGA | | | |
| | TCTGACAATGGCCCCCGGGT | | | |
| | CCACTCTGTGGCTGTCTTGT | | | |
| | GGAGTCCCACCCGACAGCGT | | | |
| | GTCCAGAGGCCCTCTGTCCT | | | |
| | GGACCCACGTGCATCCTAAG | | | |
| | GGGCCAAAAAGTCTGCTGTC | | | |
| | ACTGGAACTGAAGGACGATC | | | |
| | GGCCTGCCAGAGACATGTGG | | | |
| | GTCATGGAGACTGGACTGCT | | | |
| | GCTGCCACGAGCAACCGCAC | | | |
| | AGGATGCTGGAAAATACTATT | | | |
| | GCCACCGGGGCAATCTGACA | | | |
| | ATGTCCTTCCATCTGGAGATC | | | |
| | ACTGCAAGGCCCGTGCTGTG | | | |
| | GCACTGGCTGCTGCGAACCG | | | |
| | GAGGATGGAAGGTCAGTGCT | | | |
| | GTGACACTGGCATATCTGAT | | | |
| | CTTTTGCCTGTGCTCCCTGG | | | |
| | TGGGCATTCTGCATCTGCAG | | | |
| | AGAGCCCTGGTGCTGCGGA | | | |
| | GAAAGAGAAAGAGAATGACT | | | |
| | GACCCAACAAGAAGGTTTTGA | | | |

pBP0488--pSFG-aHER2.Q.8stm.CD3zeta.Fpk2

| | | | | SEQ ID |
|---|---|---|---|---|
| Fragment | Nucleotide | SEQ ID NO: | Peptide | NO: |
| Signal Peptide | ATGGAGTTTGGACTTTCTTGG | 707 | MEFGLSWLFLVAILKGVQCSR | 708 |
| | TTGTTTTTGGTGGCAATTCTG | | | |
| | AAGGGTGTCCAGTGTAGCAGG | | | |
| FRP5-VL | GACATCCAATTGACACAATCA | 709 | DIQLTQSHKFLSTSVGDRVSITCKA | 710 |
| | CACAAATTTCTCTCAACTTCT | | SQDVYNAVAWYQQKPGQSPKLLIY | |
| | GTAGGAGACAGAGTGAGCAT | | SASSRYTGVPSRFTGSGSGPDFTF | |
| | AACCTGCAAAGCATCCCAGG | | TISSVQAEDLAVYFCQQHFRTPFTF | |
| | ACGTGTACAATGCTGTGGCT | | GSGTKLEIKAL | |
| | TGGTACCAACAGAAGCCTGG | | | |
| | ACAATCCCCAAAATTGCTGAT | | | |
| | TTATTCTGCCTCTAGTAGGTA | | | |
| | CACTGGGGTACCTTCTCGGT | | | |
| | TTACGGGCTCTGGGTCCGGA | | | |
| | CCAGATTTCACGTTCACAATC | | | |
| | AGTTCCGTTCAAGCTGAAGA | | | |
| | CCTCGCTGTTTATTTTTGCCA | | | |
| | GCAGCACTTCCGAACCCCTT | | | |
| | TTACTTTTGGCTCAGGCACTA | | | |
| | AGTTGGAAATCAAGGCTTTG | | | |
| Linker | GGCGGAGGAAGCGGAGGTG | 711 | GGGSGGGG | 712 |
| | GGGGC | | | |
| FRP5-VH | GAAGTCCAATTGCAACAGTC | 713 | EVQLQQSGPELKKPGETVKISCKAS | 714 |
| | AGGCCCCGAATTGAAAAAGC | | GYPFTNYGMNWVKQAPGQGLKW | |
| | CCGGCGAAACAGTGAAGATA | | MGWINTSTGESTFADDFKGRFDFS | |
| | TCTTGTAAAGCCTCCGGTTAC | | LETSANTAYLQINNLKSEDMATYFC | |
| | CCTTTTACGAACTATGGAATG | | ARWEVYHGYVPYWGQGTTVTVSS | |
| | AACTGGGTCAAACAAGCCCC | | | |
| | TGGACAGGGATTGAAGTGGA | | | |
| | TGGGATGGATCAATACATCA | | | |
| | ACAGGCGAGTCTACCTTCGC | | | |
| | AGATGATTTCAAAGGTCGCTT | | | |
| | TGACTTCTCACTGGAGACCA | | | |
| | GTGCAAATACCGCCTACCTT | | | |
| | CAGATTAACAATCTTAAAAGC | | | |
| | GAGGATATGGCAACCTACTT | | | |
| | TTGCGCAAGATGGGAAGTTT | | | |
| | ATCACGGGTACGTGCCATAC | | | |
| | TGGGGACAAGGAACGACAGT | | | |
| | GACAGTTAGTAGC | | | |
| Linker | GGATCC | 715 | GS | 716 |
| Q-Bend-10 | GAACTTCCTACTCAGGGGAC | 717 | ELPTQGTFSNVSTNVS | 718 |
| (CD34 | TTTCTCAAACGTTAGCACAAA | | | |
| Epitope) | CGTAAGT | | | |
| CD8 Stalk | CCCGCCCCAAGACCCCCCAC | 719 | PAPRPPTPAPTIASQPLSLRPEACR | 720 |
| | ACCTGCGCCGACCATTGCTT | | PAAGGAVHTRGLDFACD | |
| | CTCAACCCCTGAGTTTGAGA | | | |
| | CCCGAGGCCTGCCGGCCAG | | | |
| | CTGCCGGCGGGGCCGTGCA | | | |
| | TACAAGAGGACTCGATTTCG | | | |
| | CTTGCGAC | | | |
| CD8a tm | ATCTATATCTGGGCACCTCTC | 721 | IYIWAPLAGTCGVLLLSLVITLYCNH | 722 |
| | GCTGGCACCTGTGGAGTCCT | | RNRRRVCKCPR | |
| | TCTGCTCAGCCTGGTTATTAC | | | |
| | TCTGTACTGTAATCACCGGAA | | | |
| | TCGCCGCCGCGTTTGTAAGT | | | |
| | GTCCCAGG | | | |
| Linker | CTCGAG | 723 | LE | 724 |
| CD3 zeta | AGAGTGAAGTTCAGCAGGAG | 725 | RVKFSRSADAPAYQQGQNQLYNEL | 726 |
| | CGCAGACGCCCCCGCGTAC | | NLGRREEYDVLDKRRGRDPEMGG | |
| | CAGCAGGGCCAGAACCAGCT | | KPRRKNPQEGLYNELQKDKMAEAY | |
| | CTATAACGAGCTCAATCTAG | | SEIGMKGERRRGKGHDGLYQGLST | |
| | GACGAAGAGAGGAGTACGAT | | ATKDTYDALHMQALPP | |
| | GTTTTGGACAAGAGACGTGG | | | |
| | CCGGGACCCTGAGATGGGG | | | |
| | GGAAAGCCGAGAAGGAAGAA | | | |
| | CCCTCAGGAAGGCCTGTACA | | | |
| | ATGAACTGCAGAAAGATAAG | | | |
| | ATGGCGGAGGCCTACAGTGA | | | |
| | GATTGGGATGAAAGGCGAGC | | | |
| | GCCGGAGGGGCAAGGGGCA | | | |
| | CGATGGCCTTTACCAGGGTC | | | |
| | TCAGTACAGCCACCAAGGAC | | | |
| | ACCTACGACGCCCTTCACAT | | | |
| | GCAAGCTCTTCCACCTCG | | | |
| Linker | TCAGGCGGTGGCTCAGGTGT | 727 | SGGGSGVN | 728 |
| | TAAC | | | |
| Fpk′ | GGCGTCCAAGTCGAAACCAT | 729 | GVQVETISPGDGRTFPKRGQTCVV | 730 |
| | TAGTCCCGGCGATGGCAGAA | | HYTGMLEDGKKFDSSRDRNKPFKF | |
| | CATTTCCTAAAAGGGGACAA | | MLGKQEVIRGWEEGVAQMSVGQR | |
| | ACATGTGTCGTCCATTATACA | | AKLTISPDYAYGATGHPPKIPPHATL | |
| | GGCATGTTGGAGGACGGCAA | | VFDVELLKLE | |
| | AAAGTTCGACAGTAGTAGAG | | | |
| | ATCGCAATAAACCTTTCAAAT | | | |
| | TCATGTTGGGAAAACAAGAA | | | |
| | GTCATTAGGGGATGGGAGGA | | | |
| | GGGCGTGGCTCAAATGTCCG | | | |
| | TCGGCCAACGCGCTAAGCTC | | | |
| | ACCATCAGCCCCGACTACGC | | | |
| | ATACGGCGCTACCGGACATC | | | |
| | CCCCTAAGATTCCCCCTCAC | | | |
| | GCTACCTTGGTGTTTGACGT | | | |
| | CGAACTGTTGAAGCTCGAA | | | |
| Linker | GTTAAC | 731 | VN | 732 |
| Fpk | GGAGTGCAGGTGGAGACTAT | 733 | GVQVETISPGDGRTFPKRGQTCVV | 734 |
| | CTCCCCAGGAGACGGGCGC | | HYTGMLEDGKKFDSSRDRNKPFKF | |
| | ACCTTCCCCAAGCGCGGCCA | | MLGKQEVIRGWEEGVAQMSVGQR | |
| | GACCTGCGTGGTGCACTACA | | AKLTISPDYAYGATGHPPKIPPHATL | |
| | CCGGGATGCTTGAAGATGGA | | VFDVELLKLE | |
| | AAGAAATTCGATTCCTCTCGG | | | |
| | GACAGAAACAAGCCCTTTAA | | | |
| | GTTTATGCTAGGCAAGCAGG | | | |
| | AGGTGATCCGAGGCTGGGAA | | | |
| | GAAGGGGTTGCCCAGATGAG | | | |
| | TGTGGGTCAGAGAGCCAAAC | | | |
| | TGACTATATCTCCAGATTATG | | | |
| | CCTATGGTGCCACTGGGCAC | | | |
| | CCACCTAAGATCCCACCACA | | | |
| | TGCCACTCTCGTCTTCGATGT | | | |
| | GGAGCTTCTAAAACTGGAA | | | |
| GSG Linker | GGATCGGGA | 735 | GSG | 736 |
| P2A | GCTACTAACTTCAGCCTGCT | 737 | ATNFSLLKQAGDVEENPGP | 738 |
| | GAAGCAGGCTGGAGACGTG | | | |
| | GAGGAGAACCCCGGGCCT | | | |

pBP0467--pSH1-FRBI′.FRBI.LS.ΔCaspase9

| | | | | SEQ ID |
|---|---|---|---|---|
| Fragment | Nucleotide | SEQ ID NO: | Peptide | NO: |
| FRBₗ′ | TGGCATGAAGGCCTGGAAGA | 739 | WHEGLEEASRLYFGERNVKGMFE | 740 |
| | GGCATCTCGTTTGTACTTTGG | | VLEPLHAMMERGPQTLKETSFNQA | |
| | GGAAAGGAACGTGAAAGGCA | | YGRDLMEAQEWCRKYMKSGNVKD | |
| | TGTTTGAGGTGCTGGAGCCC | | LLQAWDLYYHVFRRISK | |
| | TTGCACGCTATGATGGAACG | | | |
| | GGGCCCCCAGACTCTGAAGG | | | |
| | AAACATCCTTTAATCAGGCCT | | | |
| | ATGGTCGAGATTTAATGGAG | | | |
| | GCCCAAGAGTGGTGCAGGAA | | | |
| | GTACATGAAATCAGGGAATG | | | |
| | TCAAGGACCTCCTCCAAGCC | | | |
| | TGGGACCTCTATTATCATGTG | | | |
| | TTCCGACGAATCTCAAAG | | | |
| Linker | GTCGAG | 741 | VE | 742 |
| FRBₗ | TGGCATGAAGGGTTGGAAGA | 743 | WHEGLEEASRLYFGERNVKGMFE | 744 |
| | AGCTTCAAGGCTGTACTTCG | | VLEPLHAMMERGPQTLKETSFNQA | |
| | GAGAGAGGAACGTGAAGGG | | YGRDLMEAQEWCRKYMKSGNVKD | |
| | CATGTTTGAGGTTCTTGAACC | | LLQAWDLYYHVFRRISK | |
| | TCTGCACGCCATGATGGAAC | | | |
| | GGGGACCGCAGACACTGAAA | | | |
| | GAAACCTCTTTTAATCAGGCC | | | |
| | TACGGCAGAGACCTGATGGA | | | |
| | GGCCCAAGAATGGTGTAGAA | | | |
| | AGTATATGAAATCCGGTAAC | | | |
| | GTGAAAGACCTGCTCCAGGC | | | |
| | CTGGGACCTTTATTACCATGT | | | |
| | GTTCAGGCGGATCAGTAAG | | | |
| Linker | TCAGGCGGTGGCTCAGGT | 745 | SGGGSG | 746 |
| ΔCaspase9 | GTCGACGGATTTGGTGATGT | 747 | VDGFGDVGALESLRGNADLAYILS | 748 |
| | CGGTGCTCTTGAGAGTTTGA | | MEPCGHCLIINNVNFCRESGLRTRT | |
| | GGGGAAATGCAGATTTGGCT | | GSNIDCEKLRRRFSSLHFMVEVKG | |
| | TACATCCTGAGCATGGAGCC | | DLTAKKMVLALLELARQDHGALDC | |
| | CTGTGGCCACTGCCTCATTA | | CVVVILSHGCQASHLQFPGAVYGT | |
| | TCAACAATGTGAACTTCTGCC | | DGCPVSVEKIVNIFNGTSCPSLGGK | |
| | GTGAGTCCGGGCTCCGCACC | | PKLFFIQACGGEQKDHGFEVASTS | |
| | CGCACTGGCTCCAACATCGA | | PEDESPGSNPEPDATPFQEGLRTF | |
| | CTGTGAGAAGTTGCGGCGTC | | DQLDAISSLPTPSDIFVSYSTFPGFV | |
| | GCTTCTCCTCGCTGCATTTCA | | SWRDPKSGSWYVETLDDIFEQWA | |
| | TGGTGGAGGTGAAGGGCGA | | HSEDLQSLLLRVANAVSVKGIYKQM | |
| | CCTGACTGCCAAGAAAATGG | | PGCFNFLRKKLFFKTSASRAEGRG | |
| | TGCTGGCTTTGCTGGAGCTG | | SLLTCGDVEENPGP* | |
| | GCGCgGCAGGACCACGGTG | | | |
| | CTCTGGACTGCTGCGTGGTG | | | |
| | GTCATTCTCTCTCACGGCTGT | | | |
| | CAGGCCAGCCACCTGCAGTT | | | |
| | CCCAGGGGCTGTCTACGGCA | | | |
| | CAGATGGATGCCCTGTGTCG | | | |
| | GTCGAGAAGATTGTGAACAT | | | |
| | CTTCAATGGGACCAGCTGCC | | | |
| | CCAGCCTGGGAGGGAAGCC | | | |
| | CAAGCTCTTTTTCATCCAGGC | | | |
| | CTGTGGTGGGGAGCAGAAAG | | | |
| | ACCATGGGTTTGAGGTGGCC | | | |
| | TCCACTTCCCCTGAAGACGA | | | |
| | GTCCCCTGGCAGTAACCCCG | | | |
| | AGCCAGATGCCACCCCGTTC | | | |
| | CAGGAAGGTTTGAGGACCTT | | | |
| | CGACCAGCTGGACGCCATAT | | | |
| | CTAGTTTGCCCACACCCAGT | | | |
| | GACATCTTTGTGTCCTACTCT | | | |
| | ACTTTCCCAGGTTTTGTTTCC | | | |
| | TGGAGGGACCCCAAGAGTG | | | |
| | GCTCCTGGTACGTTGAGACC | | | |
| | CTGGACGACATCTTTGAGCA | | | |
| | GTGGGCTCACTCTGAAGACC | | | |
| | TGCAGTCCCTCCTGCTTAGG | | | |
| | GTCGCTAATGCTGTTTCGGT | | | |
| | GAAAGGGATTTATAAACAGAT | | | |
| | GCCTGGTTGCTTTAATTTCCT | | | |
| | CCGGAAAAAACTTTTCTTTAA | | | |
| | AACATCAGCTAGCAGAGCCG | | | |
| | AGGGCAGGGGAAGTCTTCTA | | | |
| | ACATGCGGGGACGTGGAGG | | | |
| | AAAATCCCGGGCCCTGA | | | |

pBP0606--pSFG-k-ΔMyr.iMC.2A-ΔCD19

| | | | | SEQ ID |
|---|---|---|---|---|
| Fragment | Nucleotide | SEQ ID NO: | Peptide | NO: |
| MyD88 | ATGGCTGCAGGAGGTCCCG | 749 | MAAGGPGAGSAAPVSSTSSLPLA | 750 |
| | GCGCGGGGTCTGCGGCCCC | | ALNMRVRRRLSLFLNVRTQVAAD | |
| | GGTCTCCTCCACATCCTCCC | | WTALAEEMDFEYLEIRQLETQADP | |
| | TTCCCCTGGCTGCTCTCAAC | | TGRLLDAWQGRPGASVGRLLDLL | |
| | ATGCGAGTGCGGCGCCGCC | | TKLGRDDVLLELGPSIEEDCQKYIL | |
| | TGTCTCTGTTCTTGAACGTGC | | KQQQEEAEKPLQVAAVDSSVPRT | |
| | GGACACAGGTGGCGGCCGA | | AELAGITTLDDPLGHMPERFDAFI | |
| | CTGGACCGCGCTGGCGGAG | | CYCPSDI | |
| | GAGATGGACTTTGAGTACTT | | | |
| | GGAGATCCGGCAACTGGAGA | | | |
| | CACAAGCGGACCCCACTGGC | | | |
| | AGGCTGCTGGACGCCTGGCA | | | |
| | GGGACGCCCTGGCGCCTCT | | | |
| | GTAGGCCGACTGCTCGATCT | | | |
| | GCTTACCAAGCTGGGCCGCG | | | |
| | ACGACGTGCTGCTGGAGCTG | | | |
| | GGACCCAGCATTGAGGAGGA | | | |
| | TTGCCAAAAGTATATCTTGAA | | | |
| | GCAGCAGCAGGAGGAGGCT | | | |
| | GAGAAGCCTTTACAGGTGGC | | | |
| | CGCTGTAGACAGCAGTGTCC | | | |
| | CACGGACAGCAGAGCTGGC | | | |
| | GGGCATCACCACACTTGATG | | | |
| | ACCCCCTGGGGCATATGCCT | | | |
| | GAGCGTTTCGATGCCTTCAT | | | |
| | CTGCTATTGCCCCAGCGACA | | | |
| | TC | | | |
| Linker | GTCGAG | 751 | VG | 752 |
| hCD40 | AAAAAGGTGGCCAAGAAGCC | 753 | KKVAKKPTNKAPHPKQEPQEINFP | 754 |
| | AACCAATAAGGCCCCCCACC | | DDLPGSNTAAPVQETLHGCQPVT | |
| | CCAAGCAGGAGCCCCAGGA | | QEDGKESRISVQERQ | |
| | GATCAATTTTCCCGACGATCT | | | |
| | TCCTGGCTCCAACACTGCTG | | | |
| | CTCCAGTGCAGGAGACTTTA | | | |
| | CATGGATGCCAACCGGTCAC | | | |
| | CCAGGAGGATGGCAAAGAGA | | | |
| | GTCGCATCTCAGTGCAGGAG | | | |
| | AGACAG | | | |
| Linker | GTCGAG | 755 | VG | 756 |
| Fv′ | GGCGTCCAAGTCGAAACCAT | 757 | GVQVETISPGDGRTFPKRGQTCV | 758 |
| | TAGTCCCGGCGATGGCAGAA | | VHYTGMLEDGKKVDSSRDRNKPF | |
| | CATTTCCTAAAAGGGGACAA | | KFMLGKQEVIRGWEEGVAQMSV | |
| | ACATGTGTCGTCCATTATACA | | GQRAKLTISPDYAYGATGHPGIIPP | |
| | GGCATGTTGGAGGACGGCAA | | HATLVFDVELLKLE | |
| | AAAGGTGGACAGTAGTAGAG | | | |
| | ATCGCAATAAACCTTTCAAAT | | | |
| | TCATGTTGGGAAAACAAGAA | | | |
| | GTCATTAGGGGATGGGAGGA | | | |
| | GGGCGTGGCTCAAATGTCCG | | | |
| | TCGGCCAACGCGCTAAGCTC | | | |
| | ACCATCAGCCCCGACTACGC | | | |
| | ATACGGCGCTACCGGACATC | | | |
| | CCGGAATTATTCCCCCTCAC | | | |
| | GCTACCTTGGTGTTTGACGT | | | |
| | CGAACTGTTGAAGCTCGAA | | | |
| Linker | GTCGAG | 759 | VG | 760 |
| Fv | GGAGTGCAGGTGGAGACTAT | 761 | GVQVETISPGDGRTFPKRGQTCV | 762 |
| | CTCCCCAGGAGACGGGCGC | | VHYTGMLEDGKKVDSSRDRNKPF | |
| | ACCTTCCCCAAGCGCGGCCA | | KFMLGKQEVIRGWEEGVAQMSV | |
| | GACCTGCGTGGTGCACTACA | | GQRAKLTISPDYAYGATGHPGIIPP | |
| | CCGGGATGCTTGAAGATGGA | | HATLVFDVELLKLE | |
| | AAGAAAGTTGATTCCTCCCG | | | |
| | GGACAGAAACAAGCCCTTTA | | | |
| | AGTTTATGCTAGGCAAGCAG | | | |
| | GAGGTGATCCGAGGCTGGG | | | |
| | AAGAAGGGGTTGCCCAGATG | | | |
| | AGTGTGGGTCAGAGAGCCAA | | | |
| | ACTGACTATATCTCCAGATTA | | | |
| | TGCCTATGGTGCCACTGGGC | | | |
| | ACCCAGGCATCATCCCACCA | | | |
| | CATGCCACTCTCGTCTTCGAT | | | |
| | GTGGAGCTTCTAAAACTGGAA | | | |
| Linker | CCGCGG | 763 | PR | 764 |
| T2A | GAAGGCCGAGGGAGCCTGC | 765 | EGRGSLLTCGDVEENPGP | 766 |
| | TGACATGTGGCGATGTGGAG | | | |
| | GAAAACCCAGGACCA | | | |
| ΔCD19 | ATGCCACCACCTCGCCTGCT | 767 | MPPPRLLFFLLFLTPMEVRPEEPL | 768 |
| | GTTCTTTCTGCTGTTCCTGAC | | VVKVEEGDNAVLQCLKGTSDGPT | |
| | ACCTATGGAGGTGCGACCTG | | QQLTWSRESPLKPFLKLSLGLPGL | |
| | AGGAACCACTGGTCGTGAAG | | GIHMRPLAIWLFIFNVSQQMGGFY | |
| | GTCGAGGAAGGCGACAATGC | | LCQPGPPSEKAWQPGWTVNVEG | |
| | CGTGCTGCAGTGCCTGAAAG | | SGELFRWNVSDLGGLGCGLKNRS | |
| | GCACTTCTGATGGGCCAACT | | SEGPSSPSGKLMSPKLYVWAKDR | |
| | CAGCAGCTGACCTGGTCCAG | | PEIWEGEPPCLPPRDSLNQSLSQ | |
| | GGAGTCTCCCCTGAAGCCTT | | DLTMAPGSTLWLSCGVPPDSVSR | |
| | TTCTGAAACTGAGCCTGGGA | | GPLSWTHVHPKGPKSLLSLELKD | |
| | CTGCCAGGACTGGGAATCCA | | DRPARDMWVMETGLLLPRATAQ | |
| | CATGCGCCCTCTGGCTATCT | | DAGKYYCHRGNLTMSFHLEITARP | |
| | GGCTGTTCATCTTCAACGTG | | VLWHWLLRTGGWKVSAVTLAYLI | |
| | AGCCAGCAGATGGGAGGATT | | FCLCSLVGILHLQRALVLRRKRKR | |
| | CTACCTGTGCCAGCCAGGAC | | MTDPTRRF* | |
| | CACCATCCGAGAAGGCCTGG | | | |
| | CAGCCTGGATGGACCGTCAA | | | |
| | CGTGGAGGGGTCTGGAGAA | | | |
| | CTGTTTAGGTGGAATGTGAG | | | |
| | TGACCTGGGAGGACTGGGAT | | | |
| | GTGGGCTGAAGAACCGCTCC | | | |
| | TCTGAAGGCCCAAGTTCACC | | | |
| | CTCAGGGAAGCTGATGAGCC | | | |
| | CAAAACTGTACGTGTGGGCC | | | |
| | AAAGATCGGCCCGAGATCTG | | | |
| | GGAGGGAGAACCTCCATGCC | | | |
| | TGCCACCTAGAGACAGCCTG | | | |
| | AATCAGAGTCTGTCACAGGA | | | |
| | TCTGACAATGGCCCCCGGGT | | | |
| | CCACTCTGTGGCTGTCTTGT | | | |
| | GGAGTCCCACCCGACAGCGT | | | |
| | GTCCAGAGGCCCTCTGTCCT | | | |
| | GGACCCACGTGCATCCTAAG | | | |
| | GGGCCAAAAAGTCTGCTGTC | | | |
| | ACTGGAACTGAAGGACGATC | | | |
| | GGCCTGCCAGAGACATGTGG | | | |
| | GTCATGGAGACTGGACTGCT | | | |
| | GCTGCCACGAGCAACCGCAC | | | |
| | AGGATGCTGGAAAATACTATT | | | |
| | GCCACCGGGGCAATCTGACA | | | |
| | ATGTCCTTCCATCTGGAGATC | | | |
| | ACTGCAAGGCCCGTGCTGTG | | | |
| | GCACTGGCTGCTGCGAACCG | | | |
| | GAGGATGGAAGGTCAGTGCT | | | |
| | GTGACACTGGCATATCTGAT | | | |
| | CTTTTGCCTGTGCTCCCTGG | | | |
| | TGGGCATTCTGCATCTGCAG | | | |
| | AGAGCCCTGGTGCTGCGGA | | | |
| | GAAAGAGAAAGAGAATGACT | | | |
| | GACCCAACAAGAAGGTTTTGA | | | |

pBP0607--pSFG-k-iMC.2A-ΔCD19

| | | | | SEQ ID |
|---|---|---|---|---|
| Fragment | Nucleotide | SEQ ID NO: | Peptide | NO: |
| Myr | ATGGGGAGTAGCAAGAGCAAG | 769 | MGSSKSKPKDPSQR | 770 |
| | CCTAAGGACCCCAGCCAGCGC | | | |
| Linker | CTCGAC | 771 | LN | 772 |
| MyD88 | ATGGCTGCAGGAGGTCCCGGC | 773 | MAAGGPGAGSAAPVSSTSSLPL | 774 |
| | GCGGGGTCTGCGGCCCCGGTC | | AALNMRVRRRLSLFLNVRTQVAA | |
| | TCCTCCACATCCTCCCTTCCCC | | DWTALAEEMDFEYLEIRQLETQA | |
| | TGGCTGCTCTCAACATGCGAGT | | DPTGRLLDAWQGRPGASVGRLL | |
| | GCGGCGCCGCCTGTCTCTGTTC | | DLLTKLGRDDVLLELGPSIEEDC | |
| | TTGAACGTGCGGACACAGGTGG | | QKYILKQQQEEAEKPLQVAAVDS | |
| | CGGCCGACTGGACCGCGCTGG | | SVPRTAELAGITTLDDPLGHMPE | |
| | CGGAGGAGATGGACTTTGAGTA | | RFDAFICYCPSDI | |
| | CTTGGAGATCCGGCAACTGGAG | | | |
| | ACACAAGCGGACCCCACTGGCA | | | |
| | GGCTGCTGGACGCCTGGCAGG | | | |
| | GACGCCCTGGCGCCTCTGTAG | | | |
| | GCCGACTGCTCGATCTGCTTAC | | | |
| | CAAGCTGGGCCGCGACGACGT | | | |
| | GCTGCTGGAGCTGGGACCCAG | | | |
| | CATTGAGGAGGATTGCCAAAAG | | | |
| | TATATCTTGAAGCAGCAGCAGG | | | |
| | AGGAGGCTGAGAAGCCTTTACA | | | |
| | GGTGGCCGCTGTAGACAGCAG | | | |
| | TGTCCCACGGACAGCAGAGCTG | | | |
| | GCGGGCATCACCACACTTGATG | | | |
| | ACCCCCTGGGGCATATGCCTGA | | | |
| | GCGTTTCGATGCCTTCATCTGC | | | |
| | TATTGCCCCAGCGACATC | | | |
| Linker | GTCGAG | 775 | VG | 776 |
| hCD40 | AAAAAGGTGGCCAAGAAGCCAA | 777 | KKVAKKPTNKAPHPKQEPQEINF | 778 |
| | CCAATAAGGCCCCCCACCCCAA | | PDDLPGSNTAAPVQETLHGCQP | |
| | GCAGGAGCCCCAGGAGATCAAT | | VTQEDGKESRISVQERQ | |
| | TTTCCCGACGATCTTCCTGGCT | | | |
| | CCAACACTGCTGCTCCAGTGCA | | | |
| | GGAGACTTTACATGGATGCCAA | | | |
| | CCGGTCACCCAGGAGGATGGC | | | |
| | AAAGAGAGTCGCATCTCAGTGC | | | |
| | AGGAGAGACAG | | | |
| Linker | GTCGAG | 779 | VG | 780 |
| Fv′ | GGCGTCCAAGTCGAAACCATTA | 781 | GVQVETISPGDGRTFPKRGQTC | 782 |
| | GTCCCGGCGATGGCAGAACATT | | VVHYTGMLEDGKKVDSSRDRNK | |
| | TCCTAAAAGGGGACAAACATGT | | PFKFMLGKQEVIRGWEEGVAQM | |
| | GTCGTCCATTATACAGGCATGT | | SVGQRAKLTISPDYAYGATGHPG | |
| | TGGAGGACGGCAAAAAGGTGG | | IIPPHATLVFDVELLKLE | |
| | ACAGTAGTAGAGATCGCAATAA | | | |
| | ACCTTTCAAATTCATGTTGGGAA | | | |
| | AACAAGAAGTCATTAGGGGATG | | | |
| | GGAGGAGGGCGTGGCTCAAAT | | | |
| | GTCCGTCGGCCAACGCGCTAA | | | |
| | GCTCACCATCAGCCCCGACTAC | | | |
| | GCATACGGCGCTACCGGACATC | | | |
| | CCGGAATTATTCCCCCTCACGC | | | |
| | TACCTTGGTGTTTGACGTCGAA | | | |
| | CTGTTGAAGCTCGAA | | | |
| Linker | GTCGAG | 783 | VG | 784 |
| Fv | GGAGTGCAGGTGGAGACTATCT | 785 | GVQVETISPGDGRTFPKRGQTC | 786 |
| | CCCCAGGAGACGGGCGCACCT | | VVHYTGMLEDGKKVDSSRDRNK | |
| | TCCCCAAGCGCGGCCAGACCT | | PFKFMLGKQEVIRGWEEGVAQM | |
| | GCGTGGTGCACTACACCGGGAT | | SVGQRAKLTISPDYAYGATGHPG | |
| | GCTTGAAGATGGAAAGAAAGTT | | IIPPHATLVFDVELLKLE | |
| | GATTCCTCCCGGGACAGAAACA | | | |
| | AGCCCTTTAAGTTTATGCTAGG | | | |
| | CAAGCAGGAGGTGATCCGAGG | | | |
| | CTGGGAAGAAGGGGTTGCCCA | | | |
| | GATGAGTGTGGGTCAGAGAGC | | | |
| | CAAACTGACTATATCTCCAGATT | | | |
| | ATGCCTATGGTGCCACTGGGCA | | | |
| | CCCAGGCATCATCCCACCACAT | | | |
| | GCCACTCTCGTCTTCGATGTGG | | | |
| | AGCTTCTAAAACTGGAA | | | |
| Linker | CCGCGG | 787 | PR | 788 |
| T2A | GAAGGCCGAGGGAGCCTGCTG | 789 | EGRGSLLTCGDVEENPGP | 790 |
| | ACATGTGGCGATGTGGAGGAAA | | | |
| | ACCCAGGACCA | | | |
| ΔCD19 | ATGCCACCACCTCGCCTGCTGT | 791 | MPPPRLLFFLLFLTPMEVRPEEP | 792 |
| | TCTTTCTGCTGTTCCTGACACCT | | LVVKVEEGDNAVLQCLKGTSDG | |
| | ATGGAGGTGCGACCTGAGGAA | | PTQQLTWSRESPLKPFLKLSLGL | |
| | CCACTGGTCGTGAAGGTCGAG | | PGLGIHMRPLAIWLFIFNVSQQM | |
| | GAAGGCGACAATGCCGTGCTG | | GGFYLCQPGPPSEKAWQPGWT | |
| | CAGTGCCTGAAAGGCACTTCTG | | VNVEGSGELFRWNVSDLGGLGC | |
| | ATGGGCCAACTCAGCAGCTGAC | | GLKNRSSEGPSSPSGKLMSPKL | |
| | CTGGTCCAGGGAGTCTCCCCTG | | YVWAKDRPEIWEGEPPCLPPRD | |
| | AAGCCTTTTCTGAAACTGAGCC | | SLNQSLSQDLTMAPGSTLWLSC | |
| | TGGGACTGCCAGGACTGGGAAT | | GVPPDSVSRGPLSWTHVHPKGP | |
| | CCACATGCGCCCTCTGGCTATC | | KSLLSLELKDDRPARDMWVMET | |
| | TGGCTGTTCATCTTCAACGTGA | | GLLLPRATAQDAGKYYCHRGNL | |
| | GCCAGCAGATGGGAGGATTCTA | | TMSFHLEITARPVLWHWLLRTGG | |
| | CCTGTGCCAGCCAGGACCACCA | | WKVSAVTLAYLIFCLCSLVGILHL | |
| | TCCGAGAAGGCCTGGCAGCCT | | QRALVLRRKRKRMTDPTRRF* | |
| | GGATGGACCGTCAACGTGGAG | | | |
| | GGGTCTGGAGAACTGTTTAGGT | | | |
| | GGAATGTGAGTGACCTGGGAG | | | |
| | GACTGGGATGTGGGCTGAAGAA | | | |
| | CCGCTCCTCTGAAGGCCCAAGT | | | |
| | TCACCCTCAGGGAAGCTGATGA | | | |
| | GCCCAAAACTGTACGTGTGGGC | | | |
| | CAAAGATCGGCCCGAGATCTGG | | | |
| | GAGGGAGAACCTCCATGCCTGC | | | |
| | CACCTAGAGACAGCCTGAATCA | | | |
| | GAGTCTGTCACAGGATCTGACA | | | |
| | ATGGCCCCCGGGTCCACTCTGT | | | |
| | GGCTGTCTTGTGGAGTCCCACC | | | |
| | CGACAGCGTGTCCAGAGGCCC | | | |
| | TCTGTCCTGGACCCACGTGCAT | | | |
| | CCTAAGGGGCCAAAAAGTCTGC | | | |
| | TGTCACTGGAACTGAAGGACGA | | | |
| | TCGGCCTGCCAGAGACATGTGG | | | |
| | GTCATGGAGACTGGACTGCTGC | | | |
| | TGCCACGAGCAACCGCACAGG | | | |
| | ATGCTGGAAAATACTATTGCCA | | | |
| | CCGGGGCAATCTGACAATGTCC | | | |
| | TTCCATCTGGAGATCACTGCAA | | | |
| | GGCCCGTGCTGTGGCACTGGC | | | |
| | TGCTGCGAACCGGAGGATGGA | | | |
| | AGGTCAGTGCTGTGACACTGGC | | | |
| | ATATCTGATCTTTTGCCTGTGCT | | | |
| | CCCTGGTGGGCATTCTGCATCT | | | |
| | GCAGAGAGCCCTGGTGCTGCG | | | |
| | GAGAAAGAGAAAGAGAATGACT | | | |
| | GACCCAACAAGAAGGTTTTGA | | | |

pBP0668--pSFG-FRBₗx2.Caspase9.2A-Q.8stm.CD3zeta

| Fragment | Nucleotide | SEQ ID NO: | Peptide | SEQ ID NO: |
|---|---|---|---|---|
| FRBₗ′ | TGGCATGAAGGCCTGGAAGAGG | 793 | WHEGLEEASRLYFGERNVKGMF | 794 |
| | CATCTCGTTTGTACTTTGGGGAA | | EVLEPLHAMMERGPQTLKETSF | |
| | AGGAACGTGAAAGGCATGTTTGA | | NQAYGRDLMEAQEWCRKYMKS | |
| | GGTGCTGGAGCCCTTGCACGCT | | GNVKDLLQAWDLYYHVFRRISK | |
| | ATGATGGAACGGGGCCCCCAGA | | | |
| | CTCTGAAGGAAACATCCTTTAAT | | | |
| | CAGGCCTATGGTCGAGATTTAAT | | | |
| | GGAGGCCCAAGAGTGGTGCAGG | | | |
| | AAGTACATGAAATCAGGGAATGT | | | |
| | CAAGGACCTCCTCCAAGCCTGG | | | |
| | GACCTCTATTATCATGTGTTCCG | | | |
| | ACGAATCTCAAAG | | | |
| Linker | GTCGAG | 795 | VG | 796 |
| FRBₗ | TGGCATGAAGGGTTGGAAGAAG | 797 | WHEGLEEASRLYFGERNVKGMF | 798 |
| | CTTCAAGGCTGTACTTCGGAGAG | | EVLEPLHAMMERGPQTLKETSF | |
| | AGGAACGTGAAGGGCATGTTTG | | NQAYGRDLMEAQEWCRKYMKS | |
| | AGGTTCTTGAACCTCTGCACGCC | | GNVKDLLQAWDLYYHVFRRISK | |
| | ATGATGGAACGGGGACCGCAGA | | | |
| | CACTGAAAGAAACCTCTTTTAAT | | | |
| | CAGGCCTACGGCAGAGACCTGA | | | |
| | TGGAGGCCCAAGAATGGTGTAG | | | |
| | AAAGTATATGAAATCCGGTAACG | | | |
| | TGAAAGACCTGCTCCAGGCCTG | | | |
| | GGACCTTTATTACCATGTGTTCA | | | |
| | GGCGGATCAGTAAG | | | |
| Linker | TCAGGCGGTGGCTCAGGT | 799 | SGGGSG | 800 |
| ΔCaspase9 | TCGACGGATTTGGTGATGTCGGT | 801 | DGFGDVGALESLRGNADLAYILS | 802 |
| | GCTCTTGAGAGTTTGAGGGGAA | | MEPCGHCLIINNVNFCRESGLRT | |
| | ATGCAGATTTGGCTTACATCCTG | | RTGSNIDCEKLRRRFSSLHFMVE | |
| | AGCATGGAGCCCTGTGGCCACT | | VKGDLTAKKMVLALLELARQDHG | |
| | GCCTCATTATCAACAATGTGAAC | | ALDCCVVVILSHGCQASHLQFPG | |
| | TTCTGCCGTGAGTCCGGGCTCC | | AVYGTDGCPVSVEKIVNIFNGTS | |
| | GCACCCGCACTGGCTCCAACAT | | CPSLGGKPKLFFIQACGGEQKDH | |
| | CGACTGTGAGAAGTTGCGGCGT | | GFEVASTSPEDESPGSNPEPDA | |
| | CGCTTCTCCTCGCTGCATTTCAT | | TPFQEGLRTFDQLDAISSLPTPS | |
| | GGTGGAGGTGAAGGGCGACCTG | | DIFVSYSTFPGFVSWRDPKSGS | |
| | ACTGCCAAGAAAATGGTGCTGG | | WYVETLDDIFEQWAHSEDLQSLL | |
| | CTTTGCTGGAGCTGGCGCGGCA | | LRVANAVSVKGIYKQMPGCFNFL | |
| | GGACCACGGTGCTCTGGACTGC | | RKKLFFKTSASRA | |
| | TGCGTGGTGGTCATTCTCTCTCA | | | |
| | CGGCTGTCAGGCCAGCCACCTG | | | |
| | CAGTTCCCAGGGGCTGTCTACG | | | |
| | GCACAGATGGATGCCCTGTGTC | | | |
| | GGTCGAGAAGATTGTGAACATCT | | | |
| | TCAATGGGACCAGCTGCCCCAG | | | |
| | CCTGGGAGGGAAGCCCAAGCTC | | | |
| | TTTTTCATCCAGGCCTGTGGTGG | | | |
| | GGAGCAGAAAGACCATGGGTTT | | | |
| | GAGGTGGCCTCCACTTCCCCTG | | | |
| | AAGACGAGTCCCCTGGCAGTAA | | | |
| | CCCCGAGCCAGATGCCACCCCG | | | |
| | TTCCAGGAAGGTTTGAGGACCTT | | | |
| | CGACCAGCTGGACGCCATATCT | | | |
| | AGTTTGCCCACACCCAGTGACAT | | | |
| | CTTTGTGTCCTACTCTACTTTCC | | | |
| | CAGGTTTTGTTTCCTGGAGGGAC | | | |
| | CCCAAGAGTGGCTCCTGGTACG | | | |
| | TTGAGACCCTGGACGACATCTTT | | | |
| | GAGCAGTGGGCTCACTCTGAAG | | | |
| | ACCTGCAGTCCCTCCTGCTTAGG | | | |
| | GTCGCTAATGCTGTTTCGGTGAA | | | |
| | AGGGATTTATAAACAGATGCCTG | | | |
| | GTTGCTTTAATTTCCTCCGGAAA | | | |
| | AAACTTTTCTTTAAAACATCAGCT | | | |
| | AGCAGAGCC | | | |
| Linker | CCGCGG | 803 | PR | 804 |
| T2A | GAAGGCCGAGGGAGCCTGCTGA | 805 | EGRGSLLTCGDVEENPGP | 806 |
| | CATGTGGCGATGTGGAGGAAAA | | | |
| | CCCAGGACCA | | | |
| Signal | ATGGAATTTGGCCTCTCCTGGTT | 807 | MEFGLSWLFLVAILKGVQCSR | 808 |
| Peptide | GTTTCTCGTGGCCATTCTTAAGG | | | |
| | GTGTGCAGTGCTCCAGA | | | |
| Linker | ATGCAT | 809 | MH | 810 |
| Q-Bend | GAACTTCCTACTCAGGGGACTTT | 811 | ELPTQGTFSNVSTNVS | 812 |
| (CD34 | CTCAAACGTTAGCACAAACGTAA | | | |
| Epitope) | GT | | | |
| CD8 Stalk | CCCGCCCCAAGACCCCCCACAC | 813 | PAPRPPTPAPTIASQPLSLRPEA | 814 |
| | CTGCGCCGACCATTGCTTCTCAA | | CRPAAGGAVHTRGLDFACD | |
| | CCCCTGAGTTTGAGACCCGAGG | | | |
| | CCTGCCGGCCAGCTGCCGGCG | | | |
| | GGGCCGTGCATACAAGAGGACT | | | |
| | CGATTTCGCTTGCGAC | | | |
| CD8a tm | ATCTATATCTGGGCACCTCTCGC | 815 | IYIWAPLAGTCGVLLLSLVITLYCN | 816 |
| | TGGCACCTGTGGAGTCCTTCTG | | HRNRRRVCKCPRVD | |
| | CTCAGCCTGGTTATTACTCTGTA | | | |
| | CTGTAATCACCGGAATCGCCGC | | | |
| | CGCGTTTGTAAGTGTCCCAGGG | | | |
| | TCGAC | | | |
| CD3 zeta | AGAGTGAAGTTCAGCAGGAGCG | 817 | RVKFSRSADAPAYQQGQNQLYN | 818 |
| | CAGACGCCCCCGCGTACCAGCA | | ELNLGRREEYDVLDKRRGRDPE | |
| | GGGCCAGAACCAGCTCTATAAC | | MGGKPRRKNPQEGLYNELQKDK | |
| | GAGCTCAATCTAGGACGAAGAG | | MAEAYSEIGMKGERRRGKGHDG | |
| | AGGAGTACGATGTTTTGGACAAG | | LYQGLSTATKDTYDALHMQALPP | |
| | AGACGTGGCCGGGACCCTGAGA | | | |
| | TGGGGGGAAAGCCGAGAAGGAA | | | |
| | GAACCCTCAGGAAGGCCTGTAC | | | |
| | AATGAACTGCAGAAAGATAAGAT | | | |
| | GGCGGAGGCCTACAGTGAGATT | | | |
| | GGGATGAAAGGCGAGCGCCGGA | | | |
| | GGGGCAAGGGGCACGATGGCCT | | | |
| | TTACCAGGGTCTCAGTACAGCCA | | | |
| | CCAAGGACACCTACGACGCCCT | | | |
| | TCACATGCAAGCTCTTCCACCTCG | | | |

pBP0608--pSFG-ΔMyr.iMC.2A-ΔCD19.Q.8stm.CD3zeta

| Fragment | Nucleotide | SEQ ID NO: | Peptide | SEQ ID NO: |
|---|---|---|---|---|
| MyD88 | ATGGCTGCAGGAGGTCCCGGC | 819 | MAAGGPGAGSAAPVSSTSSLPL | 820 |
| | GCGGGGTCTGCGGCCCCGGTC | | AALNMRVRRRLSLFLNVRTQVAA | |
| | TCCTCCACATCCTCCCTTCCCC | | DWTALAEEMDFEYLEIRQLETQA | |
| | TGGCTGCTCTCAACATGCGAGT | | DPTGRLLDAWQGRPGASVGRLL | |
| | GCGGCGCCGCCTGTCTCTGTT | | DLLTKLGRDDVLLELGPSIEEDC | |
| | CTTGAACGTGCGGACACAGGT | | QKYILKQQQEEAEKPLQVAAVDS | |
| | GGCGGCCGACTGGACCGCGCT | | SVPRTAELAGITTLDDPLGHMPE | |
| | GGCGGAGGAGATGGACTTTGA | | RFDAFICYCPSDI | |
| | GTACTTGGAGATCCGGCAACTG | | | |
| | GAGACACAAGCGGACCCCACT | | | |
| | GGCAGGCTGCTGGACGCCTGG | | | |
| | CAGGGACGCCCTGGCGCCTCT | | | |
| | GTAGGCCGACTGCTCGATCTG | | | |
| | CTTACCAAGCTGGGCCGCGAC | | | |
| | GACGTGCTGCTGGAGCTGGGA | | | |
| | CCCAGCATTGAGGAGGATTGC | | | |
| | CAAAAGTATATCTTGAAGCAGC | | | |
| | AGCAGGAGGAGGCTGAGAAGC | | | |
| | CTTTACAGGTGGCCGCTGTAGA | | | |
| | CAGCAGTGTCCCACGGACAGC | | | |
| | AGAGCTGGCGGGCATCACCAC | | | |
| | ACTTGATGACCCCCTGGGGCAT | | | |
| | ATGCCTGAGCGTTTCGATGCCT | | | |
| | TCATCTGCTATTGCCCCAGCGA | | | |
| | CATC | | | |
| Linker | GTCGAG | 821 | VE | 822 |
| hCD40 | AAAAAGGTGGCCAAGAAGCCAA | 823 | KKVAKKPTNKAPHPKQEPQEINF | 824 |
| | CCAATAAGGCCCCCCACCCCAA | | PDDLPGSNTAAPVQETLHGCQP | |
| | GCAGGAGCCCCAGGAGATCAA | | VTQEDGKESRISVQERQ | |
| | TTTTCCCGACGATCTTCCTGGC | | | |
| | TCCAACACTGCTGCTCCAGTGC | | | |
| | AGGAGACTTTACATGGATGCCA | | | |
| | ACCGGTCACCCAGGAGGATGG | | | |
| | CAAAGAGAGTCGCATCTCAGTG | | | |
| | CAGGAGAGACAG | | | |
| Linker | GTCGAG | 825 | VE | 826 |
| Fv′ | GGCGTCCAAGTCGAAACCATTA | 827 | GVQVETISPGDGRTFPKRGQTC | 828 |
| | GTCCCGGCGATGGCAGAACAT | | VVHYTGMLEDGKKVDSSRDRNK | |
| | TTCCTAAAAGGGGACAAACATG | | PFKFMLGKQEVIRGWEEGVAQM | |
| | TGTCGTCCATTATACAGGCATG | | SVGQRAKLTISPDYAYGATGHPG | |
| | TTGGAGGACGGCAAAAAGGTG | | IIPPHATLVFDVELLKLE | |
| | GACAGTAGTAGAGATCGCAATA | | | |
| | AACCTTTCAAATTCATGTTGGG | | | |
| | AAAACAAGAAGTCATTAGGGGA | | | |
| | TGGGAGGAGGGCGTGGCTCAA | | | |
| | ATGTCCGTCGGCCAACGCGCT | | | |
| | AAGCTCACCATCAGCCCCGACT | | | |
| | ACGCATACGGCGCTACCGGAC | | | |
| | ATCCCGGAATTATTCCCCCTCA | | | |
| | CGCTACCTTGGTGTTTGACGTC | | | |
| | GAACTGTTGAAGCTCGAA | | | |
| Linker | GTCGAG | 829 | VE | 830 |
| Fv | GGAGTGCAGGTGGAGACTATC | 831 | GVQVETISPGDGRTFPKRGQTC | 832 |
| | TCCCCAGGAGACGGGCGCACC | | VVHYTGMLEDGKKVDSSRDRNK | |
| | TTCCCCAAGCGCGGCCAGACC | | PFKFMLGKQEVIRGWEEGVAQM | |
| | TGCGTGGTGCACTACACCGGG | | SVGQRAKLTISPDYAYGATGHPG | |
| | ATGCTTGAAGATGGAAAGAAAG | | IIPPHATLVFDVELLKLE | |
| | TTGATTCCTCCCGGGACAGAAA | | | |
| | CAAGCCCTTTAAGTTTATGCTA | | | |
| | GGCAAGCAGGAGGTGATCCGA | | | |
| | GGCTGGGAAGAAGGGGTTGCC | | | |
| | CAGATGAGTGTGGGTCAGAGA | | | |
| | GCCAAACTGACTATATCTCCAG | | | |
| | ATTATGCCTATGGTGCCACTGG | | | |
| | GCACCCAGGCATCATCCCACCA | | | |
| | CATGCCACTCTCGTCTTCGATG | | | |
| | TGGAGCTTCTAAAACTGGAA | | | |
| Linker | CCGCGG | 833 | PR | 834 |
| T2A | GAAGGCCGAGGGAGCCTGCTG | 835 | EGRGSLLTCGDVEENPGP | 836 |
| | ACATGTGGCGATGTGGAGGAA | | | |
| | AACCCAGGACCA | | | |
| Linker | CCATGG | 837 | PW | 838 |
| Signal | ATGGAGTTTGGACTTTCTTGGT | 839 | MEFGLSWLFLVAILKGVQCSR | 840 |
| Peptide | TGTTTTTGGTGGCAATTCTGAA | | | |
| | GGGTGTCCAGTGTAGCAGG | | | |
| FMC63-VL | GACATCCAGATGACACAGACTA | 841 | DIQMTQTTSSLSASLGDRVTISC | 842 |
| | CATCCTCCCTGTCTGCCTCTCT | | RASQDISKYLNWYQQKPDGTVK | |
| | GGGAGACAGAGTCACCATCAG | | LLIYHTSRLHSGVPSRFSGSGSG | |
| | TTGCAGGGCAAGTCAGGACATT | | TDYSLTISNLEQEDIATYFCQQGN | |
| | AGTAAATATTTAAATTGGTATCA | | TLPYTFGGGTKLEIT | |
| | GCAGAAACCAGATGGAACTGTT | | | |
| | AAACTCCTGATCTACCATACAT | | | |
| | CAAGATTACACTCAGGAGTCCC | | | |
| | ATCAAGGTTCAGTGGCAGTGG | | | |
| | GTCTGGAACAGATTATTCTCTC | | | |
| | ACCATTAGCAACCTGGAGCAAG | | | |
| | AAGATATTGCCACTTACTTTTGC | | | |
| | CAACAGGGTAATACGCTTCCGT | | | |
| | ACACGTTCGGAGGGGGGACTA | | | |
| | AGTTGGAAATAACA | | | |
| Flex Linker | GGCGGAGGAAGCGGAGGTGG | 843 | GGGSGGGG | 844 |
| | GGGC | | | |
| FMC63-VH | GAGGTGAAACTGCAGGAGTCA | 845 | EVKLQESGPGLVAPSQSLSVTCT | 846 |
| | GGACCTGGCCTGGTGGCGCCC | | VSGVSLPDYGVSWIRQPPRKGL | |
| | TCACAGAGCCTGTCCGTCACAT | | EWLGVIWGSETTYYNSALKSRLT | |
| | GCACTGTCTCAGGGGTCTCATT | | IIKDNSKSQVFLKMNSLQTDDTAI | |
| | ACCCGACTATGGTGTAAGCTGG | | YYCAKHYYYGGSYAMDYWGQG | |
| | ATTCGCCAGCCTCCACGAAAGG | | TSVTVSS | |
| | GTCTGGAGTGGCTGGGAGTAA | | | |
| | TATGGGGTAGTGAAACCACATA | | | |
| | CTATAATTCAGCTCTCAAATCCA | | | |
| | GACTGACCATCATCAAGGACAA | | | |
| | CTCCAAGAGCCAAGTTTTCTTA | | | |
| | AAAATGAACAGTCTGCAAACTG | | | |
| | ATGACACAGCCATTTACTACTG | | | |
| | TGCCAAACATTATTACTACGGT | | | |
| | GGTAGCTATGCTATGGACTACT | | | |
| | GGGGTCAAGGAACCTCAGTCA | | | |
| | CCGTCTCCTCA | | | |
| Linker | GGATCC | 847 | GS | 848 |
| Q-Bend | GAACTTCCTACTCAGGGGACTT | 849 | ELPTQGTFSNVSTNVS | 850 |
| (CD34 | TCTCAAACGTTAGCACAAACGT | | | |
| Epitope) | AAGT | | | |
| CD8 Stalk | CCCGCCCCAAGACCCCCCACA | 851 | PAPRPPTPAPTIASQPLSLRPEA | 852 |
| | CCTGCGCCGACCATTGCTTCTC | | CRPAAGGAVHTRGLDFACD | |
| | AACCCCTGAGTTTGAGACCCGA | | | |
| | GGCCTGCCGGCCAGCTGCCGG | | | |
| | CGGGGCCGTGCATACAAGAGG | | | |
| | ACTCGATTTCGCTTGCGAC | | | |
| CD8a tm | ATCTATATCTGGGCACCTCTCG | 853 | IYIWAPLAGTCGVLLLSLVITLYCN | 854 |
| | CTGGCACCTGTGGAGTCCTTCT | | HRNRRRVCKCPR | |
| | GCTCAGCCTGGTTATTACTCTG | | | |
| | TACTGTAATCACCGGAATCGCC | | | |
| | GCCGCGTTTGTAAGTGTCCCAGG | | | |
| Linker | GTCGAC | 855 | VD | 856 |
| CD3 zeta | AGAGTGAAGTTCAGCAGGAGC | 857 | RVKFSRSADAPAYQQGQNQLYN | 858 |
| | GCAGACGCCCCCGCGTACCAG | | ELNLGRREEYDVLDKRRGRDPE | |
| | CAGGGCCAGAACCAGCTCTATA | | MGGKPRRKNPQEGLYNELQKDK | |
| | ACGAGCTCAATCTAGGACGAAG | | MAEAYSEIGMKGERRRGKGHDG | |
| | AGAGGAGTACGATGTTTTGGAC | | LYQGLSTATKDTYDALHMQALPP | |
| | AAGAGACGTGGCCGGGACCCT | | | |
| | GAGATGGGGGGAAAGCCGAGA | | | |
| | AGGAAGAACCCTCAGGAAGGC | | | |
| | CTGTACAATGAACTGCAGAAAG | | | |
| | ATAAGATGGCGGAGGCCTACA | | | |
| | GTGAGATTGGGATGAAAGGCG | | | |
| | AGCGCCGGAGGGGCAAGGGG | | | |
| | CACGATGGCCTTTACCAGGGTC | | | |
| | TCAGTACAGCCACCAAGGACAC | | | |
| | CTACGACGCCCTTCACATGCAA | | | |
| | GCTCTTCCACCTCG | | | |

pBP0609: pSFG-iMC.2A-ΔCD19.Q.8stm.CD3zeta

| Fragment | Nucleotide | SEQ ID NO: | Peptide | SEQ ID NO: |
|---|---|---|---|---|
| Myr | ATGGGGAGTAGCAAGAGCAAG | 859 | MGSSKSKPKDPSQR | 860 |
| | CCTAAGGACCCCAGCCAGCGC | | | |
| Linker | CTCGAC | 861 | LD | 862 |
| MyD88 | ATGGCTGCAGGAGGTCCCGGC | 863 | MAAGGPGAGSAAPVSSTSSLPL | 864 |
| | GCGGGGTCTGCGGCCCCGGTC | | AALNMRVRRRLSLFLNVRTQVAA | |
| | TCCTCCACATCCTCCCTTCCCC | | DWTALAEEMDFEYLEIRQLETQA | |
| | TGGCTGCTCTCAACATGCGAGT | | DPTGRLLDAWQGRPGASVGRLL | |
| | GCGGCGCCGCCTGTCTCTGTT | | DLLTKLGRDDVLLELGPSIEEDC | |
| | CTTGAACGTGCGGACACAGGT | | QKYILKQQQEEAEKPLQVAAVDS | |
| | GGCGGCCGACTGGACCGCGCT | | SVPRTAELAGITTLDDPLGHMPE | |
| | GGCGGAGGAGATGGACTTTGA | | RFDAFICYCPSDI | |
| | GTACTTGGAGATCCGGCAACT | | | |
| | GGAGACACAAGCGGACCCCAC | | | |
| | TGGCAGGCTGCTGGACGCCTG | | | |
| | GCAGGGACGCCCTGGCGCCTC | | | |
| | TGTAGGCCGACTGCTCGATCT | | | |
| | GCTTACCAAGCTGGGCCGCGA | | | |
| | CGACGTGCTGCTGGAGCTGGG | | | |
| | ACCCAGCATTGAGGAGGATTG | | | |
| | CCAAAAGTATATCTTGAAGCAG | | | |
| | CAGCAGGAGGAGGCTGAGAAG | | | |
| | CCTTTACAGGTGGCCGCTGTA | | | |
| | GACAGCAGTGTCCCACGGACA | | | |
| | GCAGAGCTGGCGGGCATCACC | | | |
| | ACACTTGATGACCCCCTGGGG | | | |
| | CATATGCCTGAGCGTTTCGATG | | | |
| | CCTTCATCTGCTATTGCCCCAG | | | |
| | CGACATC | | | |
| Linker | GTCGAG | 865 | VE | 866 |
| hCD40 | AAAAAGGTGGCCAAGAAGCCA | 867 | KKVAKKPTNKAPHPKQEPQEINF | 868 |
| | ACCAATAAGGCCCCCCACCCC | | PDDLPGSNTAAPVQETLHGCQP | |
| | AAGCAGGAGCCCCAGGAGATC | | VTQEDGKESRISVQERQ | |
| | AATTTTCCCGACGATCTTCCTG | | | |
| | GCTCCAACACTGCTGCTCCAGT | | | |
| | GCAGGAGACTTTACATGGATGC | | | |
| | CAACCGGTCACCCAGGAGGAT | | | |
| | GGCAAAGAGAGTCGCATCTCA | | | |
| | GTGCAGGAGAGACAG | | | |
| Linker | GTCGAG | 869 | VE | 870 |
| Fv′ | GGCGTCCAAGTCGAAACCATTA | 871 | GVQVETISPGDGRTFPKRGQTC | 872 |
| | GTCCCGGCGATGGCAGAACAT | | VVHYTGMLEDGKKVDSSRDRNK | |
| | TTCCTAAAAGGGGACAAACATG | | PFKFMLGKQEVIRGWEEGVAQM | |
| | TGTCGTCCATTATACAGGCATG | | SVGQRAKLTISPDYAYGATGHPG | |
| | TTGGAGGACGGCAAAAAGGTG | | IIPPHATLVFDVELLKLE | |
| | GACAGTAGTAGAGATCGCAATA | | | |
| | AACCTTTCAAATTCATGTTGGG | | | |
| | AAAACAAGAAGTCATTAGGGGA | | | |
| | TGGGAGGAGGGCGTGGCTCAA | | | |
| | ATGTCCGTCGGCCAACGCGCT | | | |
| | AAGCTCACCATCAGCCCCGACT | | | |
| | ACGCATACGGCGCTACCGGAC | | | |
| | ATCCCGGAATTATTCCCCCTCA | | | |
| | CGCTACCTTGGTGTTTGACGTC | | | |
| | GAACTGTTGAAGCTCGAA | | | |
| Linker | GTCGAG | 873 | VE | 874 |
| Fv | GGAGTGCAGGTGGAGACTATC | 875 | GVQVETISPGDGRTFPKRGQTC | 876 |
| | TCCCCAGGAGACGGGCGCACC | | VVHYTGMLEDGKKVDSSRDRNK | |
| | TTCCCCAAGCGCGGCCAGACC | | PFKFMLGKQEVIRGWEEGVAQM | |
| | TGCGTGGTGCACTACACCGGG | | SVGQRAKLTISPDYAYGATGHPG | |
| | ATGCTTGAAGATGGAAAGAAAG | | IIPPHATLVFDVELLKLE | |
| | TTGATTCCTCCCGGGACAGAAA | | | |
| | CAAGCCCTTTAAGTTTATGCTA | | | |
| | GGCAAGCAGGAGGTGATCCGA | | | |
| | GGCTGGGAAGAAGGGGTTGCC | | | |
| | CAGATGAGTGTGGGTCAGAGA | | | |
| | GCCAAACTGACTATATCTCCAG | | | |
| | ATTATGCCTATGGTGCCACTGG | | | |
| | GCACCCAGGCATCATCCCACC | | | |
| | ACATGCCACTCTCGTCTTCGAT | | | |
| | GTGGAGCTTCTAAAACTGGAA | | | |
| Linker | CCGCGG | 877 | PR | 878 |
| T2A | GAAGGCCGAGGGAGCCTGCTG | 879 | EGRGSLLTCGDVEENPGP | 880 |
| | ACATGTGGCGATGTGGAGGAA | | | |
| | AACCCAGGACCA | | | |
| Linker | CCATGG | 881 | PW | 882 |
| Signal | ATGGAGTTTGGACTTTCTTGGT | 883 | MEFGLSWLFLVAILKGVQCSR | 884 |
| Peptide | TGTTTTTGGTGGCAATTCTGAA | | | |
| | GGGTGTCCAGTGTAGCAGG | | | |
| FMC63-VL | GACATCCAGATGACACAGACTA | 885 | DIQMTQTTSSLSASLGDRVTISC | 886 |
| | CATCCTCCCTGTCTGCCTCTCT | | RASQDISKYLNWYQQKPDGTVK | |
| | GGGAGACAGAGTCACCATCAG | | LLIYHTSRLHSGVPSRFSGSGSG | |
| | TTGCAGGGCAAGTCAGGACATT | | TDYSLTISNLEQEDIATYFCQQGN | |
| | AGTAAATATTTAAATTGGTATCA | | TLPYTFGGGTKLEIT | |
| | GCAGAAACCAGATGGAACTGTT | | | |
| | AAACTCCTGATCTACCATACAT | | | |
| | CAAGATTACACTCAGGAGTCCC | | | |
| | ATCAAGGTTCAGTGGCAGTGG | | | |
| | GTCTGGAACAGATTATTCTCTC | | | |
| | ACCATTAGCAACCTGGAGCAAG | | | |
| | AAGATATTGCCACTTACTTTTG | | | |
| | CCAACAGGGTAATACGCTTCCG | | | |
| | TACACGTTCGGAGGGGGGACT | | | |
| | AAGTTGGAAATAACA | | | |
| Flex Linker | GGCGGAGGAAGCGGAGGTGG | 887 | GGGSGGGG | 888 |
| | GGGC | | | |
| FMC63-VH | GAGGTGAAACTGCAGGAGTCA | 889 | EVKLQESGPGLVAPSQSLSVTCT | 890 |
| | GGACCTGGCCTGGTGGCGCCC | | VSGVSLPDYGVSWIRQPPRKGL | |
| | TCACAGAGCCTGTCCGTCACAT | | EWLGVIWGSETTYYNSALKSRLT | |
| | GCACTGTCTCAGGGGTCTCATT | | IIKDNSKSQVFLKMNSLQTDDTAI | |
| | ACCCGACTATGGTGTAAGCTG | | YYCAKHYYYGGSYAMDYWGQG | |
| | GATTCGCCAGCCTCCACGAAA | | TSVTVSS | |
| | GGGTCTGGAGTGGCTGGGAGT | | | |
| | AATATGGGGTAGTGAAACCACA | | | |
| | TACTATAATTCAGCTCTCAAATC | | | |
| | CAGACTGACCATCATCAAGGAC | | | |
| | AACTCCAAGAGCCAAGTTTTCT | | | |
| | TAAAAATGAACAGTCTGCAAAC | | | |
| | TGATGACACAGCCATTTACTAC | | | |
| | TGTGCCAAACATTATTACTACG | | | |
| | GTGGTAGCTATGCTATGGACTA | | | |
| | CTGGGGTCAAGGAACCTCAGT | | | |
| | CACCGTCTCCTCA | | | |
| Linker | GGATCC | 891 | GS | 892 |
| Q-Bend | GAACTTCCTACTCAGGGGACTT | 893 | ELPTQGTFSNVSTNVS | 894 |
| (CD34 | TCTCAAACGTTAGCACAAACGT | | | |
| Epitope) | AAGT | | | |
| CD8 Stalk | CCCGCCCCAAGACCCCCCACA | 895 | PAPRPPTPAPTIASQPLSLRPEA | 896 |
| | CCTGCGCCGACCATTGCTTCTC | | CRPAAGGAVHTRGLDFACD | |
| | AACCCCTGAGTTTGAGACCCGA | | | |
| | GGCCTGCCGGCCAGCTGCCGG | | | |
| | CGGGGCCGTGCATACAAGAGG | | | |
| | ACTCGATTTCGCTTGCGAC | | | |
| CD8a tm | ATCTATATCTGGGCACCTCTCG | 897 | IYIWAPLAGTCGVLLLSLVITLYCN | 898 |
| | CTGGCACCTGTGGAGTCCTTCT | | HRNRRRVCKCPR | |
| | GCTCAGCCTGGTTATTACTCTG | | | |
| | TACTGTAATCACCGGAATCGCC | | | |
| | GCCGCGTTTGTAAGTGTCCCA | | | |
| | GG | | | |
| Linker | GTCGAC | 899 | VD | 900 |
| CD3 zeta | AGAGTGAAGTTCAGCAGGAGC | 901 | RVKFSRSADAPAYQQGQNQLYN | 902 |
| | GCAGACGCCCCCGCGTACCAG | | ELNLGRREEYDVLDKRRGRDPE | |
| | CAGGGCCAGAACCAGCTCTAT | | MGGKPRRKNPQEGLYNELQKDK | |
| | AACGAGCTCAATCTAGGACGAA | | MAEAYSEIGMKGERRRGKGHDG | |
| | GAGAGGAGTACGATGTTTTGGA | | LYQGLSTATKDTYDALHMQALPP | |
| | CAAGAGACGTGGCCGGGACCC | | | |
| | TGAGATGGGGGGAAAGCCGAG | | | |
| | AAGGAAGAACCCTCAGGAAGG | | | |
| | CCTGTACAATGAACTGCAGAAA | | | |
| | GATAAGATGGCGGAGGCCTAC | | | |
| | AGTGAGATTGGGATGAAAGGC | | | |
| | GAGCGCCGGAGGGGCAAGGG | | | |
| | GCACGATGGCCTTTACCAGGG | | | |
| | TCTCAGTACAGCCACCAAGGAC | | | |
| | ACCTACGACGCCCTTCACATGC | | | |
| | AAGCTCTTCCACCTCG | | | |

### Example 24: An Inducible Cell Death Switch Directed by Heterodimerizing Ligands

### Methods

### Transfection of Cells

[0766] HEK 293T cells (5×10⁵) were seeded on a 100-mm tissue culture dish in 10 mL DMEM4500, supplemented with glutamine, penicillin/streptomycin and 10% fetal calf serum. After 16-30 hours incubation, cells were transfected using Novagen's GeneJuice® protocol. Briefly, for each transfection, 0.5 mL OptiMEM was pipeted into a 1.5-mL microcentrifuge tube and 15 μL GeneJuice reagent added followed by 5 sec. vortexing. Samples were rested 5 minutes to settle the GeneJuice suspension. DNA (5 μg total) was added to each tube and mixed by pipetting up and down four times. Samples were allowed to rest for 5 minutes for GeneJuice-DNA complex formation and the suspension added dropwise to one dish of 293T cells. A typical transfection contains 1 μg SRα-SEAP (pBP0046) (2), 2 μg FRB-Caspase-9 (pBP0463) and 2 μg FKBPv12-Caspase-9 (pBP0044) (7).

Stimulation of Cells with Dimerizing Drugs

[0767] 24 hours following transfection (4.1), 293T cells were split to 96-well plates and incubated with dilutions of dimerizing drugs. Briefly, 100 μL media was added to each well of a 96-well flat-bottom plate. Drugs were diluted in tubes to a concentration 4× the top concentration in the gradient to be place on the plate. 100 μL of dimerizing ligand (rimiducid, rapamycin, isopropoxylrapamycin) was added to each of three wells on the far right of the plate (assays are thereby performed in triplicate). 100 μL from each drug-containing well was then transferred to the adjacent well and the cycle repeated 10 times to produce a serial two-fold step gradient. The last wells were untreated and serve as a control for basal reporter activity. Transfected 293 cells were then trypsinized, washed with complete media, suspended in media and 100 μL aliquoted to each well containing drug (or no drug). Cells were incubated 24 hours.

### Assay of Reporter Activity

[0768] The SRα promoter is a hybrid transcriptional element comprising the SV40 early region (which drives T antigen transcription) and parts (R and U5) of the Long Terminal Repeat (LTR) of Human T Cell Lymphotropic Virus (HTLV-1). This promoter drives high, constitutive levels of the Secreted Alkaline Phosphate (SeAP) reporter gene. Activation of caspase-9 by dimerization rapidly leads to cell death and the proportion of cells dying increases with increasing drug amounts. When cells die, transcription and translation of reporter stops but already secreted reporter proteins persists in the media. Loss of constitutive SeAP activity is thereby an effective proxy for drug-dependent activation of cell death.

[0769] 24 hours after drug stimulation, 96-well plates were wrapped to prevent evaporation and incubated at 65° C. for 2 hours to inactivate endogenous and serum phosphatases while the heat-stable SeAP reporter remains (1, 4, 100 μL samples from each well were loaded into individual wells of a 96-well assay plate with black sides. Samples were incubated with 0.5 mM 4-methylumbelliferyl phosphate (4-MUP) in 0.5 M diethanolamine at pH 10.0 for 4 to 16 hours. Phosphatase activity was measured by fluorescence with excitation at 355 nm and emission at 460 nm. Data was transferred to a Microsoft Excel spreadsheet for tabulation and graphed with GraphPad Prism.

### Production of Isopropyloxyrapamycin

[0770] The method of Luengo et al. ((J. Org. Chem 59:6512, (1994)), (16, 17)) was employed. Briefly, 20 mg of rapamycin was dissolved in in 3 mL isopropanol and 22.1 mg of p-toluene sulfonic acid was added and incubated at room temperature with stirring for 4-12 hours. At completion, 5 mL ethyl acetate was added and products were extracted five times with saturated sodium bicarbonate and 3 times with brine (saturated sodium chloride). The organic phase was dried and redissolved in ethyl acetate:hexane (3:1). Stereoisomers and minor products were resolved by FLASH chromatography on a 10 to 15-mL silica gel column with 3:1 ethyl acetate:hexane under 3-4 KPa pressure and fractions dried. Fractions were assayed by spectrophotometry at 237 nM, 267 nM, 278 nM and 290 nM and tested for binding specificity in a FRB allele-specific transcriptional switch.

Direct Dimerization of FRB-Caspase with FKBP-Caspase with Rapamycin Directs Apoptosis.

[0771] Dimerization of FKBP-fused caspases can be dimerized by homodimerizer molecules, such as AP1510, AP20187 or AP1903. A similar pro-apototic switch can be directed via heterodimerization of a binary switch using rapamycin by coexpression of a FRB-Caspase-9 fusion protein along with FKBP-Caspase-9, leading to homodimerization of the caspase domains. In FIG. 37, a constitutively active SeAP reporter plasmid was cotransfected into 293T cells along with the caspase constructs. Transfected cells abundantly produced SeAP that was readily measured without drug and which served as the 100% normalization standard in the experiment. Incubation of the two fusion proteins with rimiducid produces a dose-dependent homodimerization of only FKBP12-Caspase9, leading to dimerization and activation of apoptosis, while FRB-Caspase9 remains excluded from the rimiducid-driven complex (left). In contrast, incubation with rapamycin associates FRB and FKBP directly and linked Caspase-9 moieties associate and activate. Cell death was measured indirectly by the loss of SeAP reporter production as cells die. This experiment demonstrated that heterodimerization with rapamycin produces dose-dependent cell death, revealing a novel safety switch with nanomolar drug sensitivity.

[0772] FIG. 37—Drug induced programmed cell death by homodimerization or heterodimerization of tagged caspase 9. 293T cells were transfected with SRα-SeAP (pBP0046), pSH1-FKBPv12-Caspase9 (pBP0044) and pSH1-FRB_{L}-Caspase9 (pBP0463). After 24-hr incubation, cells were split and incubated with increasing concentrations of rapamycin (blue), rimiducid (red) or ethanol (the solvent containing stock rapamycin). Loss of reporter activity is a proxy for the loss of cell viability. Reporter activity is expressed as a percentage of the average of 8 control wells containing no drug. Assays with drugs were performed in triplicate.

### Cell Death can be Directed by Rapamycin or Rapamycin Analogs.

[0773] Rapamycin is an effective heterodimerizing agent, but as a result of causing the docking of FKBP12 with the protein kinase mTOR, rapamycin is also a potent inhibitor of signal transduction, resulting in reduced protein translation and reduced cell growth. Derivatives of rapamycin at C3 or C7 ring positions have reduced affinity for mTOR but retain high affinity for mutants in “helix 4” of the FRB domain. Plasmid pBP0463 contains a mutation that substitutes leucine for the wild-type threonine at position 2098 in the FRB domain (using the mTOR numbering) and accommodates derivatives at C7. Incubation of 293T cells transfected with FRB_{L}-Caspase 9, FKBP_{V}12-Caspase 9 and the constitutive SeAP reporter produced a dose-dependent high efficacy cell death switch with rapamycin or the rapamycin analog (rapalog) C7-isopropyloxlrapamycin (FIG. 38).

[0774] FIG. 38—Rapalog-induced cell death switch. 293T cells were transfected with SRα-SeAP (pBP0046), pSH1-FKBPv12-Caspase9 (pBP0044) and pSH1-FRB_{L}-Caspase9 (pBP0463). After 24-hr incubation, cells were split and incubated with increasing concentrations of rapamycin (blue), C7-isopropyloxlrapamcin (green) or ethanol (the solvent containing drug stocks). Loss of reporter activity is a proxy for loss of cell viability. Reporter activity is expressed as a percentage of the average of 8 wells containing no drug. Drug-containing assays were performed in triplicate.

### Rapamycin-Induced Cell Death Requires the Presence of FRB-Caspase-9.

[0775] To demonstrate that rapamycin-induced cell death results from dimerization of Caspase-9 molecules linked separately with FRB and FKBP12, two control experiments were performed

[0776] (FIGS. 39 and 40). iC9 (FKBPv12-Caspase-9) was cotransfected with a control vector expressing only an epitope tag (FIG. 39) or a vector containing FRB without caspase fusion, but instead with a short, irrelevant tag (FIG. 40). In each case, incubation with rimiducid effectively permitted homodimerization and induction of Caspase-9, but rapamycin incubation did not promote cell death. These findings support the conclusion that the mechanism of rapamycin/rapalog-mediated cell death is activation of dimerized C9 molecules rather than recruitment of mTOR to Caspase-9 or due to an indirect mechanism involving endogenous mTOR inhibition.

[0777] FIG. 39—FRB-Caspase-9 is required for a rapamycin-induced cell death switch. 293T cells were transfected with SRα-SeAP (pBP0046), pS-NLS-E and pSH1-FKBPv12-Caspase9 (pBP0044).

[0778] FIG. 40—Caspase-9 fusion with FRB is required for a rapamycin-induced cell death switch. 293T cells were transfected with SRα-SeAP (pBP0046), pSH1-FRB_{L}-VP16 (pBP0731) (4) and pSH1-FKBPv12-Caspase9 (pBP0044). After 24-hr incubation, cells were split and incubated with increasing concentrations of rapamycin (blue), C7-isopropyloxlrapamcin (red), rimiducid (green) or ethanol (the solvent containing drug stocks). Loss of reporter activity is a proxy for the loss of cell viability. Reporter activity is expressed as a percentage of the average of 8 wells containing no drug. Drug-containing wells were assayed in triplicate wells.

[0779] The following references are referred to in this Example and are hereby incorporated by reference herein in their entireties:
[0780] 1. Spencer D M, Wandless T J, Schreiber S L, and Crabtree G R. Controlling signal transduction with synthetic ligands. Science. 1993; 262(5136):1019-24.
[0781] 2. Acevedo V D, Gangula R D, Freeman K W, Li R, Zhang Y, Wang F, Ayala G E, Peterson L E, Ittmann M, and Spencer D M. Inducible FGFR-1 activation leads to irreversible prostate adenocarcinoma and an epithelial-to-mesenchymal transition. Cancer Cell. 2007; 12(6):559-71.
[0782] 3. Spencer D M, Belshaw P J, Chen L, Ho S N, Randazzo F, Crabtree G R, and Schreiber S L. Functional analysis of Fas signaling in vivo using synthetic inducers of dimerization. Curr Biol. 1996; 6(7):839-47.
[0783] 4. Bayle J H, Grimley J S, Stankunas K, Gestwicki J E, Wandless T J, and Crabtree G R. Rapamycin analogs with differential binding specificity permit orthogonal control of protein activity. Chem Biol. 2006; 13(1):99-107.
[0784] 5. Strasser A, Cory S, and Adams J M. Deciphering the rules of programmed cell death to improve therapy of cancer and other diseases. EMBO J. 2011; 30(18):3667-83.
[0785] 6. Fan L, Freeman K W, Khan T, Pham E, and Spencer D M. Improved artificial death switches based on caspases and FADD. Hum Gene Ther. 1999; 10(14):2273-85.
[0786] 7. Straathof K C, Pule M A, Yotnda P, Dotti G, Vanin E F, Brenner M K, Heslop H E, Spencer D M, and Rooney C M. An inducible caspase 9 safety switch for T-cell therapy. Blood. 2005; 105(11):4247-54.
[0787] 8. Sabatini D M, Erdjument-Bromage H, Lui M, Tempst P, and Snyder S H. RAFT1: a mammalian protein that binds to FKBP12 in a rapamycin-dependent fashion and is homologous to yeast TORs. Cell. 1994; 78(1):35-43.
[0788] 9. Brown E J, Albers M W, Shin T B, Ichikawa K, Keith C T, Lane W S, and Schreiber S L. A mammalian protein targeted by G1-arresting rapamycin-receptor complex. Nature. 1994; 369(6483):756-8.
[0789] 10. Chen J, Zheng X F, Brown E J, and Schreiber S L. Identification of an 11-kDa FKBP12-rapamycin-binding domain within the 289-kDa FKBP12-rapamycin-associated protein and characterization of a critical serine residue. Proc Natl Acad Sci USA. 1995; 92(11):4947-51.
[0790] 11. Choi J, Chen J, Schreiber S L, and Clardy J. Structure of the FKBP12-rapamycin complex interacting with the binding domain of human FRAP. Science. 1996; 273(5272):239-42.
[0791] 12. Ho S N, Biggar S R, Spencer D M, Schreiber S L, and Crabtree G R. Dimeric ligands define a role for transcriptional activation domains in reinitiation. Nature. 1996; 382(6594):822-6.
[0792] 13. Klemm J D, Beals C R, and Crabtree G R. Rapid targeting of nuclear proteins to the cytoplasm. Curr Biol. 1997; 7(9):638-44.
[0793] 14. Stankunas K, Bayle J H, Gestwicki J E, Lin Y M, Wandless T J, and Crabtree G R. Conditional protein alleles using knockin mice and a chemical inducer of dimerization. Mol Cell. 2003; 12(6):1615-24.
[0794] 15. Stankunas K, Bayle J H, Havranek J J, Wandless T J, Baker D, Crabtree G R, and Gestwicki J E. Rescue of Degradation-Prone Mutants of the FK506-Rapamycin Binding (FRB) Protein with Chemical Ligands. Chembiochem. 2007.
[0795] 16. Liberles S D, Diver S T, Austin D J, and Schreiber S L. Inducible gene expression and protein translocation using nontoxic ligands identified by a mammalian three-hybrid screen. Proc Natl Acad Sci USA. 1997; 94(15):7825-30.
[0796] 17. Luengo J I, Yamashita D S, Dunnington D, Beck A K, Rozamus L W, Yen H K, Bossard M J, Levy M A, Hand A, Newman-Tarr T, et al. Structure-activity studies of rapamycin analogs: evidence that the C-7 methoxy group is part of the effector domain and positioned at the FKBP12-FRAP interface. Chem Biol. 1995; 2(7):471-81.

pBP0463--pSH1-FRB_{L}.dCaspase9.T2A (From FIG. 41)

| | | SEQ ID | | |
|---|---|---|---|---|
| Fragment | Nucleotide | NO: | Peptide | SEQ ID NO: |
| Linker | ATGCTCGAG | 903 | MLE | 904 |
| FRB_{L} | TGGCATGAAGGGTTGGAAGAAG | 905 | GVQVETISPGDGRTFPKRGQT | 906 |
| | CTTCAAGGCTGTACTTCGGAGA | | CVVHYTGMLEDGKKFDSSRDR | |
| | GAGGAACGTGAAGGGCATGTTT | | NKPFKFMLGKQEVIRGWEEGV | |
| | GAGGTTCTTGAACCTCTGCACG | | AQMSVGQRAKLTISPDYAYGAT | |
| | CCATGATGGAACGGGGACCGC | | GHPPKIPPHATLVFDVELLKLE | |
| | AGACACTGAAAGAAACCTCTTTT | | | |
| | AATCAGGCCTACGGCAGAGACC | | | |
| | TGATGGAGGCCCAAGAATGGTG | | | |
| | TAGAAAGTATATGAAATCCGGTA | | | |
| | ACGTGAAAGACCTGCTCCAGGC | | | |
| | CTGGGACCTTTATTACCATGTGT | | | |
| | TCAGGCGGATCAGTAAG | | | |
| Linker | TCAGGCGGTGGCTCAGGTGTC | 907 | SGGGSGVD | 908 |
| | GAG | | | |
| Δ-Caspase9 | GTCGACGGATTTGGTGATGTCG | 909 | DGFGDVGALESLRGNADLAYIL | 910 |
| | GTGCTCTTGAGAGTTTGAGGGG | | SMEPCGHCLIINNVNFCRESGL | |
| | AAATGCAGATTTGGCTTACATCC | | RTRTGSNIDCEKLRRRFSSLHF | |
| | TGAGCATGGAGCCCTGTGGCCA | | MVEVKGDLTAKKMVLALLELAR | |
| | CTGCCTCATTATCAACAATGTGA | | QDHGALDCCVVVILSHGCQAS | |
| | ACTTCTGCCGTGAGTCCGGGCT | | HLQFPGAVYGTDGCPVSVEKIV | |
| | CCGCACCCGCACTGGCTCCAAC | | NIFNGTSCPSLGGKPKLFFIQAC | |
| | ATCGACTGTGAGAAGTTGCGGC | | GGEQKDHGFEVASTSPEDESP | |
| | GTCGCTTCTCCTCGCTGCATTT | | GSNPEPDATPFQEGLRTFDQL | |
| | CATGGTGGAGGTGAAGGGCGA | | DAISSLPTPSDIFVSYSTFPGFV | |
| | CCTGACTGCCAAGAAAATGGTG | | SWRDPKSGSWYVETLDDIFEQ | |
| | CTGGCTTTGCTGGAGCTGGCGC | | WAHSEDLQSLLLRVANAVSVK | |
| | gGCAGGACCACGGTGCTCTGGA | | GIYKQMPGCFNFLRKKLFFKTS | |
| | CTGCTGCGTGGTGGTCATTCTC | | ASRA | |
| | TCTCACGGCTGTCAGGCCAGCC | | | |
| | ACCTGCAGTTCCCAGGGGCTGT | | | |
| | CTACGGCACAGATGGATGCCCT | | | |
| | GTGTCGGTCGAGAAGATTGTGA | | | |
| | ACATCTTCAATGGGACCAGCTG | | | |
| | CCCCAGCCTGGGAGGGAAGCC | | | |
| | CAAGCTCTTTTTCATCCAGGCCT | | | |
| | GTGGTGGGGAGCAGAAAGACC | | | |
| | ATGGGTTTGAGGTGGCCTCCAC | | | |
| | TTCCCCTGAAGACGAGTCCCCT | | | |
| | GGCAGTAACCCCGAGCCAGAT | | | |
| | GCCACCCCGTTCCAGGAAGGTT | | | |
| | TGAGGACCTTCGACCAGCTGGA | | | |
| | CGCCATATCTAGTTTGCCCACA | | | |
| | CCCAGTGACATCTTTGTGTCCT | | | |
| | ACTCTACTTTCCCAGGTTTTGTT | | | |
| | TCCTGGAGGGACCCCAAGAGT | | | |
| | GGCTCCTGGTACGTTGAGACCC | | | |
| | TGGACGACATCTTTGAGCAGTG | | | |
| | GGCTCACTCTGAAGACCTGCAG | | | |
| | TCCCTCCTGCTTAGGGTCGCTA | | | |
| | ATGCTGTTTCGGTGAAAGGGAT | | | |
| | TTATAAACAGATGCCTGGTTGCT | | | |
| | TTAATTTCCTCCGGAAAAAACTT | | | |
| | TTCTTTAAAACATCAGCTAGCAG | | | |
| | AGCC | | | |
| T2A | GAGGGCAGGGGAAGTCTTCTAA | 911 | EGRGSLLTCGDVEENPGP | 912 |
| | CATGCGGGGACGTGGAGGAAA | | | |
| | ATCCCGGGCCCtga | | | |

pBP0044--pSH1-FKBP_{V36}.dCaspase9.T2A (from FIG. 42

| Fragment | Nucleotide | SEQ ID NO: | Peptide | SEQ ID NO: |
|---|---|---|---|---|
| Linker | ATGCTCGAG | 913 | MLE | 914 |
| FKBP_{V36} | GGAGTGCAGGTGGAgACtATCT | 915 | GVQVETISPGDGRTFPKRGQTC | 916 |
| | CCCCAGGAGACGGGCGCACC | | VVHYTGMLEDGKKVDSSRDRNK | |
| | TTCCCCAAGCGCGGCCAGACC | | PFKFMLGKQEVIRGWEEGVAQM | |
| | TGCGTGGTGCACTACACCGGG | | SVGQRAKLTISPDYAYGATGHPG | |
| | ATGCTTGAAGATGGAAAGAAA | | IIPPHATLVFDVELLKL | |
| | GTTGATTCCTCCCGGGACAGA | | | |
| | AACAAGCCCTTTAAGTTTATGC | | | |
| | TAGGCAAGCAGGAGGTGATCC | | | |
| | GAGGCTGGGAAGAAGGGGTT | | | |
| | GCCCAGATGAGTGTGGGTCAG | | | |
| | AGAGCCAAACTGACTATATCTC | | | |
| | CAGATTATGCCTATGGTGCCA | | | |
| | CTGGGCACCCAGGCATCATCC | | | |
| | CACCACATGCCACTCTCGTCTT | | | |
| | CGATGTGGAGCTTCTAAAACT | | | |
| | GGAA | | | |
| Linker | TCAGGCGGTGGCTCAGGTGTC | 917 | SGGGSGVD | 918 |
| | GAG | | | |
| Δ-Caspase9 | GTCGACGGATTTGGTGATGTC | 919 | DGFGDVGALESLRGNADLAYILS | 920 |
| | GGTGCTCTTGAGAGTTTGAGG | | MEPCGHCLIINNVNFCRESGLRT | |
| | GGAAATGCAGATTTGGCTTACA | | RTGSNIDCEKLRRRFSSLHFMVE | |
| | TCCTGAGCATGGAGCCCTGTG | | VKGDLTAKKMVLALLELARQDHG | |
| | GCCACTGCCTCATTATCAACAA | | ALDCCVVVILSHGCQASHLQFPG | |
| | TGTGAACTTCTGCCGTGAGTC | | AVYGTDGCPVSVEKIVNIFNGTS | |
| | CGGGCTCCGCACCCGCACTG | | CPSLGGKPKLFFIQACGGEQKDH | |
| | GCTCCAACATCGACTGTGAGA | | GFEVASTSPEDESPGSNPEPDA | |
| | AGTTGCGGCGTCGCTTCTCCT | | TPFQEGLRTFDQLDAISSLPTPS | |
| | CGCTGCATTTCATGGTGGAGG | | DIFVSYSTFPGFVSWRDPKSGS | |
| | TGAAGGGCGACCTGACTGCCA | | WYVETLDDIFEQWAHSEDLQSLL | |
| | AGAAAATGGTGCTGGCTTTGC | | LRVANAVSVKGIYKQMPGCFNFL | |
| | TGGAGCTGGCGCgGCAGGACC | | RKKLFFKTSASRA | |
| | ACGGTGCTCTGGACTGCTGCG | | | |
| | TGGTGGTCATTCTCTCTCACG | | | |
| | GCTGTCAGGCCAGCCACCTGC | | | |
| | AGTTCCCAGGGGCTGTCTACG | | | |
| | GCACAGATGGATGCCCTGTGT | | | |
| | CGGTCGAGAAGATTGTGAACA | | | |
| | TCTTCAATGGGACCAGCTGCC | | | |
| | CCAGCCTGGGAGGGAAGCCC | | | |
| | AAGCTCTTTTTCATCCAGGCCT | | | |
| | GTGGTGGGGAGCAGAAAGACC | | | |
| | ATGGGTTTGAGGTGGCCTCCA | | | |
| | CTTCCCCTGAAGACGAGTCCC | | | |
| | CTGGCAGTAACCCCGAGCCAG | | | |
| | ATGCCACCCCGTTCCAGGAAG | | | |
| | GTTTGAGGACCTTCGACCAGC | | | |
| | TGGACGCCATATCTAGTTTGCC | | | |
| | CACACCCAGTGACATCTTTGTG | | | |
| | TCCTACTCTACTTTCCCAGGTT | | | |
| | TTGTTTCCTGGAGGGACCCCA | | | |
| | AGAGTGGCTCCTGGTACGTTG | | | |
| | AGACCCTGGACGACATCTTTG | | | |
| | AGCAGTGGGCTCACTCTGAAG | | | |
| | ACCTGCAGTCCCTCCTGCTTA | | | |
| | GGGTCGCTAATGCTGTTTCGG | | | |
| | TGAAAGGGATTTATAAACAGAT | | | |
| | GCCTGGTTGCTTTAATTTCCTC | | | |
| | CGGAAAAAACTTTTCTTTAAAA | | | |
| | CATCAGCTAGCAGAGCC | | | |
| T2A | GAGGGCAGGGGAAGTCTTCTA | 921 | EGRGSLLTCGDVEENPGP | 922 |
| | ACATGCGGGGACGTGGAGGAA | | | |
| | AATCCCGGGCCCtga | | | |

### Example 25: Dual Control of Modified Cells

[0797] Chemical Induction of protein Dimerization (CID) has been effectively applied to make cellular suicide or apoptosis inducible with the small molecule homodimerizing ligand, rimiducid (AP1903). This technology underlies the “safety switch” incorporated as a gene therapy adjunct in cell transplants (1, 2). Using this technology, normal cellular regulatory pathways that rely on protein-protein interaction as part of a signaling pathway can be adapted to ligand-dependent, conditional control if a small molecule dimerizing drug is used to control the protein-protein oligomerization event (3-5). Induced dimerization of a fusion protein comprising Caspase-9 and FKBP12 or an FKBP12 variant (i.e., “iCaspase9/iCasp9/iC9) using a homodimerizing ligand, such as rimiducid (AP1903), AP1510 or AP20187, can rapidly effect cell death. (Amara J F (97) PNAS 94:10618-23). Caspase-9 is an initiating caspase that acts as a “gate-keeper” of the apoptotic process (6). Pro-apoptotic molecules (e.g., cytochrome c) released from the mitochondria of apoptotic cells alter the conformation of Apaf-1, a caspase-9-binding scaffold, leading to its oligomerization and formation of the “apoptosome”. This alteration facilitates caspase-9 dimerization and cleavage of its latent form into an active molecule that, in turn, cleaves the “downstream” apoptosis effector, caspase-3, leading to irreversible cell death. Rimiducid binds directly with two FKBP12-V36 moieties and can direct the dimerization of fusion proteins that include FKBP12-V36 (1, 2). iC9 engagement with rimiducid circumvents the need for Apaf1 conversion to the active apoptosome. In this example, the fusion of caspase-9 to protein moieties that engage a heterodimerizing ligand was assayed for its ability to direct its activation and cell death with similar efficacy to rimiducid-mediated iC9 activation.

[0798] MyD88 and CD40 were chosen as the basis of the iMC activation switch. MyD88 plays a central signaling role in the detection of pathogens or cell injury by antigen-presenting cells (APCs), like dendritic cells (DCs). Following exposure to pathogen- or necrotic cells-derived “danger” molecules”, a subclass of “pattern recognition receptors”, called Toll-Like Receptors (TLRs) are activated, leading to the aggregation and activation of adapter molecule, MyD88, via homologous TLR-IL1RA (TIR) domains on both proteins. MyD88, in turn, activates downstream signaling, via the rest of the protein. This leads to the upregulation of costimulatory proteins, like CD40, and other proteins, like MHC and proteases, needed for antigen processing and presentation. The fusion of signaling domains from MyD88 and CD40 with two Fv domains, provides iMC (also MCFvvMC.FvFv), which potently activated DCs following exposure to rimiducid (7). It was later found that iMC is a potent costimulatory protein for T cells, as well.

[0799] Rapamycin is a natural product macrolide that binds with high affinity (<1 nM) to FKBP12 and together initiates the high-affinity, inhibitory interaction with the FKBP-Rapamycin-Binding (FRB) domain of mTOR (8). FRB is small (89 amino acids) and can thereby be used as a protein “tag” or “handle” when appended to many proteins (9-11). Coexpression of a FRB-fused protein with a second FKBP12-fused protein renders their approximation rapamycin-inducible (12-16). This and the following examples provide experiments and results designed to test whether coexpression of FRB-bound Caspase-9 (iRC9) with FKBP-bound Caspase-9 (iC9) can also direct apoptosis and serve as the basis for a cell safety switch regulated by the orally available ligand, rapamycin, or derivatives of rapamycin (rapalogs) that do not inhibit mTOR at a low, therapeutic dose but instead bind with selected, Caspase-9-fused mutant FRB domains.

[0800] Also provided in these examples is another embodiment of the dual-switch technology, (FwtFRBC9/MCFvFv) where a homodimerizer, such as AP1903 (rimiducid), induces activation of a modified cell, and a heterodimerizer, such as rapamycin or a rapalog, activates a safety switch, causing apoptosis of the modified cell. In this embodiment, for example, a chimeric pro-apoptotic polypeptide, such as, for example, Caspase-9, comprising both an FKBP12 and an FRB, or FRB variant region (FwtFRBC9) is expressed in a cell along with an inducible chimeric MyD88/CD40 costimulating polypeptide, that comprises MyD88 and CD40 polypeptides and at least two copies of FKBP12v36 (MC.FvFv). Upon contacting the cell with a dimerizer that binds to the Fv regions, the MC.FvFv dimerizes or multimerizes, and activates the cell. The cell may, for example, be a T cell that expresses a chimeric antigen receptor directed against a target antigen (CARζ). As a safety switch, the cell may be contacted with a heterodimerizer, such as, for example, rapamycin, or a rapalog, that binds to the FRB region on the FwtFRB.C9 polypeptide, as well as the FKBP12 region on the FwtFRB.C9 polypeptide, causing direct dimerization of the Caspase-9 polypeptide, and inducing apoptosis. (FIG. 43 (2), FIG. 57). In another mechanism, the heterodimerizer binds to the FRB region on the FwtFRBC9 polypeptide, and the Fv region on the MC.FvFv polypeptide, causing scaffold-induced dimerization, due to the scaffold of two FKBP12v36 polypeptides on each MC.FvFv polypeptide (FIG. 43 (1)), and inducing apoptosis. Nucleic acid constructs that contain both MC.FvFv and FwtFRBC9 have been named FwtFRBC9/MC.FvFv, for purposes of these examples.

[0801] In another embodiment of the dual-switch technology, (FRBFwtMC/FvC9) a heterodimerizer, such as rapamycin or a rapalog, induces activation of a modified cell, and a homodimerizer, such as AP1903 activates a safety switch, causing apoptosis of the modified cell. In this embodiment, for example, a chimeric pro-apoptotic polypeptide, such as, for example, Caspase-9, comprising an Fv region (iFvC9) was expressed in a cell along with an inducible chimeric MyD88/CD40 costimulating polypeptide, that comprises MyD88 and CD40 polypeptides and both an FKBP12 and an FRB or FRB variant region (FwtFRBMC) (MC.FvFv). Upon contacting the cell with rapamycin or a rapalog that heterodimerizes the FKBP12 and FRB regions, the FwtFRBMC dimerizes or multimerizes, and activates the cell. The cell may, for example, be a T cell that expresses a chimeric antigen receptor directed against a target antigen (CARζ). As a safety switch, the cell may be contacted with a homodimerizer, such as, for example, AP1903, that binds to the iFvC9 polypeptide, causing direct dimerization of the Caspase-9 polypeptide, and inducing apoptosis. (FIG. 57 (right)). Nucleic acid constructs that contain both iFvC9 and FwtFRBMC have been named FwtFRBMC/FvC9 for purposes of these examples.xxx

### Materials and Methods

### Production of Retroviruses and Transduction of Peripheral Blood Mononuclear Cells (PBMCs)

[0802] HEK 293T cells (1.5×10⁵) were seeded on a 100-mm tissue culture dish in 10 mL DMEM4500, supplemented with glutamine, penicillin/streptomycin and 10% fetal calf serum. After 16-30 hours incubation, cells were transfected using Novagen's GeneJuice® protocol. Briefly, for each transfection, 0.5 mL OptiMEM (LifeTechnologies) was pipeted into a 1.5-mL microcentrifuge tube and 30 μL GeneJuice reagent added followed by 5 sec. vortexing. Samples were rested 5 minutes to settle the GeneJuice suspension. DNA (15 μg total) was added to each tube and mixed by pipetting up and down four times. Samples were allowed to rest for 5 minutes for GeneJuice-DNA complex formation and the suspension added dropwise to one dish of 293T cells. A typical transfection included these plasmids to produce replication incompetent retrovirus: 3.75 μg plasmid containing gag-pol (pEQ-PAM3(-E)), 2.5 μg plasmid containing viral envelope (e.g., RD114), Retrovirus containing gene of interest=3=3.75 μg.

[0803] PBMCs were stimulated with anti-CD3 and anti-CD28 antibodies precoated to wells of tissue culture plates. 24 hours after plating, 100 U/ml IL-2 was added to the culture. On day 2 or three supernatant containing retrovirus from transfected 293T cells was filtered at 0.45 μm and centrifuged on non-TC treated plates precoated with Retronectin (10 μl per well in 1 ml of PBS per 1 cm² of surface). Plates were centrifuged at 2000 g for 2 hours at room temperature. CD3/CD28 blasts were resuspended at 2.5×10⁵ cells/ml in complete media, supplemented with 100 U/ml IL-2 and centrifuged on the plate at 1000×g for 10 minutes at room temperature. After 3-4 days incubation cells were counted and transduction efficiency measured by flow cytometry using the appropriate marker antibodies (typically CD34 or CD19). Cells were maintained in complete media supplemented with 100 U/ml IL-2, refed cells every 2-3 days with fresh media and IL-2 and split as needed to expand the cells.

### T Cell Caspase Assay in Cultured Cells

[0804] After transduction with the appropriate retrovirus, 50,000 T were seeded per well of 96-well plates in the presence or absence of suicide drugs (rimiducid or rapamycin) in CTL medium without IL-2. To enable detection of apoptosis using the IncuCyte instrument, 2 μM of IncuCyte™ Kinetic Caspase-3/7 Apoptosis reagent (Essen Bioscience, 4440) were add to each well to reach a total volume of 200 μl. The plates were centrifuged for 5 min at 400×g and placed inside the IncuCyte (Dual Color Model 4459) to monitor green fluorescence every 2-3 hours for a total of 48 hours at 10× objective. Image analysis was performed using the “Tcells_caspreagent_phase_green_10×_MLD” processing definition. The “Total Green Object Integrated Intensity” metric is used to quantify caspase activation. Each condition was performed in duplicates and each well was imaged at 4 different locations.

### T Cell Anti-Tumor Assay

[0805] The HPAC PSCA⁺ tumor cells were stably labeled with nuclear-localized RFP protein using the NucLight™ Red Lentivirus Reagent (Essen Bioscience, 4625). To set up the coculture, 4000 HPAC-RFP cells were seeded per well of 96-well plates in 100 μl of CTL medium without IL-2 for at least 4 hours to allow tumor cells to adhere. After transduction with the appropriate retrovirus and allowed to rest for at least 7 days in culture, T were seeded according to various E:T ratios to the HPAC-RFP-containing 96-well plates. Rimiducid was also added to the culture to reach 300 μl total volume per well. Each plate was set up in duplicates, one plate to monitor with the IncuCyte cell imaging system and one plate for supernatant collection for ELISA assay on day 2. The plates were centrifuged for 5 min at 400×g and placed inside the IncuCyte (Essen Bioscience, Dual Color Model 4459) to monitor red fluorescence (and green fluorescence if T cells were labeled with GFP-Ffluc) every 2-3 hours for a total of 7 days at 10× objective. Image analysis was performed using the “HPAC-RFP_TcellsGFP_10×_MLD” processing definition. On day 7, HPAC-RFP cells were analyzed using the “Red Object Count (1/well)” metric. Also on day 7, 0 or 10 nM of suicide drug were added to each well of the coculture and placed back in the IncuCyte to monitor T cell elimination. On day 8, Tcell-GFP cells were analyzed using the “Total Green Object Integrated Intensity” metric. Each condition was performed at least in duplicates and each well was imaged at 4 different locations.

[0806] To measure Raji cell anti-tumor activity populations of cells were determined by flow cytometry rather than incucyte as the cells do not adhere to a plate. Raji cells (ATCC) labeled by stable expression of Green Fluorescent Protein (Raji-GFP) are a Burkitt's lymphoma cell line that express CD19 on the cell surface and are a target for an anti-CD19 CAR. 50000 Raji-GFP cells were seeded on a 24 well plate with 10000 CAR-T cells, a 1:5 E:T ratio. Media supernatant was taken at 48 hours for determination of cytokine release by activated CAR-T cells. The degree of tumor killing was determined at 7 days and 14 days by flow cytometry (Galeos, Beckman-Coulter) by the proportion of GFP labeled tumor cells and CD3 labeled T cells.

### IVIS Imaging

[0807] NSG mice with labeled T cells anesthetized with isofluorane and injected with 100 μl D-luciferin (15 mg/ml stock solution in PBS) by an intraperitoneal (i.p.) route in the lower abdomen. After 10 minutes the animals were transferred from the anesthesia chamber to the IVIS platform. Images were acquired from the dorsal and ventral sides with an IVIS imager (Perkin-Elmer), and BLI quantitated and documented with Living Image software (IVIS Imaging Systems).

### Western Blot

[0808] After transduction with the appropriate retrovirus, 6,000,000 T cells were seeded per well of 6-well plates in 3 ml CTL medium. Twenty-four hours later, cells were collected, washed in cold PBS, and lysed in RIPA Lysis and Extraction Buffer (Thermo, 89901) containing 1× Halt Protease Inhibitor Cocktail (Thermo, 87786) on ice for 30 min. in the plated. The lysates were centrifuged at 16,000×g for 20 min at 4° C. and the supernatants were transferred to new Eppendorf tubes. Protein assay was performed using the Pierce BCA Protein Assay Kit (Thermo, 23227) per manufacturer's recommendation. To prepare samples for SDS-PAGE, 50 ug of lysates were mixed with 4× Laemmli Sample Buffer (Bio Rad, 1610747) and heat at 95° C. for 10 min. Meanwhile, 10% SDS gels were prepared using Bio Rad casting apparatus and 30% Acrylamide/bis Solution (Bio Rad, 160158). The samples were loaded along with Precision Plus Protein Dual Color Standards (Bio Rad, 1610374) and ran in 1× Tris/glycine Running Buffer (Bio Rad, 1610771) at 140 V for 90 min. After protein separation, the gels were transferred onto PVDF membranes using the program 0 (7 min total) in the iBlot 2 device (Thermo, IB21001). The membranes were probed with primary and secondary antibodies using the iBind Flex Western Device (Thermo, SLF2000) according to manufacturer's recommendation. Anti-MyD88 antibody (Sigma, SAB1406154) was used at 1:200 dilution and the secondary HRP-conjugated goat anti-mouse IgG antibody (Thermo, A16072) was used at 1:500 dilution. The caspase-9 antibody (Thermo, PA1-12506) was used at 1:200 dilution and the secondary HRP-conjugated goat anti-rabbit IgG antibody (Thermo, A16104) was used at 1:500 dilution. The β-actin antibody (Thermo, PA1-16889) was used at 1:1000 dilution and the secondary HRP-conjugated goat anti-rabbit IgG antibody (Thermo, A16104) was used at 1:1000 dilution. The membranes were developed using the SuperSignal West Femto Maximum Sensitivity Substrate Kit (Thermo, 34096) and imaged using the GelLogic 6000 Pro camera and the CareStream MI software (v.5.3.1.16369).

### Transfection of Cells for Reporter Assay

[0809] HEK 293T cells (1.5×10⁵) were seeded on a 100-mm tissue culture dish in 10 mL DMEM4500, supplemented with glutamine, penicillin/streptomycin and 10% fetal calf serum. After 16-30 hours incubation, cells were transfected using Novagen's GeneJuice® protocol. Briefly, for each transfection, 0.5 mL OptiMEM was pipeted into a 1.5-mL microcentrifuge tube and 15 μL GeneJuice reagent added followed by 5 sec. vortexing. Samples were rested 5 minutes to settle the GeneJuice suspension. DNA (5 μg total) was added to each tube and mixed by pipetting up and down four times. Samples were allowed to rest for 5 minutes for GeneJuice-DNA complex formation and the suspension added dropwise to one dish of 293T cells. A typical transfection contains 1 μg NFkB-SEAP (5), 4 μg iMC+CARζ(pBP0774) or 4 μg MC-Rap-CAR (pBP1440) (1).

Stimulation of Cells with Dimerizing Drugs

[0810] 24 hours following transfection (4.1), 293T cells were split to 96-well plates and incubated with dilutions of dimerizing drugs. Briefly, 100 μL media was added to each well of a 96-well flat-bottom plate. Drugs were diluted in tubes to a concentration 4× the top concentration in the gradient to be place on the plate. 100 μL of dimerizing ligand (rimiducid, rapamycin, isopropoxylrapamycin) was added to each of three wells on the far right of the plate (assays are thereby performed in triplicate). 100 μL from each drug-containing well was then transferred to the adjacent well and the cycle repeated 10 times to produce a serial two-fold step gradient. The last wells were untreated and serve as a control for basal reporter activity. Transfected 293 cells were then trypsinized, washed with complete media, suspended in media and 100 μL aliquoted to each well containing drug (or no drug). Cells were incubated 24 hours.

### Assay of Reporter Activity

[0811] The SRα promoter is a hybrid transcriptional element comprising the SV40 early region (which drives T antigen transcription) and parts (R and U5) of the Long Terminal Repeat (LTR) of Human T Cell Lymphotropic Virus (HTLV-1). This promoter drives high, constitutive levels of the Secreted Alkaline Phosphate (SeAP) reporter gene. Activation of caspase-9 by dimerization rapidly leads to cell death and the proportion of cells dying increases with increasing drug amounts. When cells die, transcription and translation of reporter stops but already secreted reporter proteins persists in the media. Loss of constitutive SeAP activity is thereby an effective proxy for drug-dependent activation of cell death.

[0812] 24 hours after drug stimulation, 96-well plates were wrapped to prevent evaporation and incubated at 65®C for 2 hours to inactivate endogenous and serum phosphatases while the heat-stable SeAP reporter remains (3, 12, 14). 100 μL samples from each well were loaded into individual wells of a 96-well assay plate with black sides. Samples were incubated with 0.5 mM 4-methylumbelliferyl phosphate (4-MUP) in 0.5 M diethanolamine at pH 10.0 for 4 to 16 hours. Phosphatase activity was measured by fluorescence with excitation at 355 nm and emission at 460 nm. Data was transferred to a Microsoft Excel spreadsheet for tabulation and graphed with GraphPad Prism.

### Production of Isopropyloxyrapamycin

[0813] The method of Luengo et al. ((J. Org. Chem 59:6512, (1994)), (17, 18)) was employed. Briefly, 20 mg of rapamycin was dissolved in in 3 mL isopropanol and 22.1 mg of p-toluene sulfonic acid was added and incubated at room temperature with stirring for 4-12 hours. At completion, 5 mL ethyl acetate was added and products were extracted five times with saturated sodium bicarbonate and 3 times with brine (saturated sodium chloride). The organic phase was dried and redissolved in ethyl acetate:hexane (3:1). Stereoisomers and minor products were resolved by FLASH chromatography on a 10 to 15-mL silica gel column with 3:1 ethyl acetate:hexane under 3-4 KPa pressure and fractions dried. Fractions were assayed by spectrophotometry at 237 nM, 267 nM, 278 nM and 290 nM and tested for binding specificity in a FRB allele-specific transcriptional switch.

### Expression of Components of the Activation Switch Technology

[0814] Retroviral constructs were created to express fusion proteins between FKBP12 with and without FRB and the inducible target protein. The constructs co-express Chimeric Antigen Receptors (CAR) as part of a gene therapy strategy to direct tumor specific immunity. Inducible (MC.FvFv) or constitutive (MC) costimulatory molecules were also present with the Caspase-9 safety switch. Each component was separated with a 2A cotranslational cleavage site derived from picornaviruses. To better understand how these molecules will function together in target T cells, it was important to determine steady state protein levels in T cells. To determine relative protein expression levels of all components of the “iMC+CARζ-T” (pBP0608; MC.FvFv+CARζ), “i9+CARζ+MC” (pBP0844; iFvCasp9+CARζ+constitutively active “MC”), and (pBP1300; FwtFRBC9/MC.FvFv+CARζ+iMC) vectors, Western blot analysis was performed on transduced T cells from four different donors using antibodies specific for MyD88, caspase-9 and α-actin (FIG. 44A). The results revealed that iMC+CARζ-T T cells express the MC.FvFv component at similar levels to i9+CARζ+MC T cells expressing MC (without fused FKBP12). However, the level of MC.FvFv expression in FwtFRBC9/MC.FvFv T cells was significantly lower than in the other two CAR modified T cells. Similarly, the iFvC9 component in the i9+CARζ+MC construct was expressed at much higher levels compared to the iFwtFRBC9 component (FKBP.FRB.ΔC9) in the FwtFRBC9/MC.FvFv construct, suggesting that the larger multi-cistronic insert was limiting protein expression or that high basal signaling activity from MC was eliminating cells expressing high levels of these chimeric proteins. To distinguish between these possibilities, the stability of CAR expression and basal toxicity in T cells over prolonged culture in vitro was assessed. CAR expression was analyzed by flow cytometry using antibody, QBend-10 (Biolegend), specific for an epitope derived from human CD34 incorporated into the extracellular portion of a 1^{st} generation CAR-C, and T cell viability was assessed using a Nexelon Cellometer with the cells stained with acridine orange and propidium iodide cells. Expression analysis by flow cytometry (Galleos, Beckman) demonstrated that iMC+CARζ-T cells express much higher CAR levels compared to i9+CARζ+MC and T cells (FIG. 44B). However, there was relatively no difference in the viability of cells grown in culture between the cells that had been modified with all three CAR T cell types (FIG. 44C). Thus, the difference in chimeric protein expression may have been based on the limiting packaging ability of the viral vector used.

Induction of Apoptosis with FwtFRBC9/MC.FvFv Constructs

[0815] To determine whether the FwtFRBC9/MC.FvFv construct was functional despite somewhat lower protein expression per cell, the functionality of the on and off switches incorporated into the FwtFRBC9/MC.FvFv construct design was examined in the absence of target tumor cells. The off switch (iFwtFRBC9), which was activated by rapamycin-induced dimerization of FKBP.FRB.ΔC9, was tested by subjecting T cells from 4 different donors, which were transduced with the iMC+CARζ-T, i9+CARζ+MC, and FwtFRBC9/MC.FvFv vectors, to a caspase-based killing assay using the “Caspase 3/7 Green” reagent (FIG. 45A). In this assay a peptide sensitive to Caspase 3 or 7 was linked with a latent fluorescent DNA intercalating dye. Activation of caspase 3/7 during apoptosis releases the dye permitting DNA binding and green cell fluorescence. A 96-well microplate containing cells was placed inside an IncuCyte machine to monitor activated caspase activity (cleaved caspase 3/7 reagent=green fluorescence) for 48 hours. The IncuCyte is an automated microscope that can observe, quantitate and document live cells cultured on plates with or without fluorescent labels over extended time periods. In the absence of drug, FwtFRBC9/MC.FvFv T cells displayed the highest level of basal toxicity followed by iMC+CARζ-T and i9+CARζ+MC-T cells, respectively. Rimiducid induced activation of iC9 (in i9+CARζ+MC) at a similar efficiency as rapamycin-inducing iFwtFRBC9 at all ligand concentrations (0.8, 4, 20 nM). However, the kinetics of iC9 activation appears to be slightly faster than that of iFwtFRBC9 activation. After 48 hours of suicide drug treatment, cells were analyzed by flow cytometry for the following markers: CD34 (engineered CAR T cell), propidium iodide (PI), Annexin V, and cleaved caspase 3/7 (green fluorescence) (FIG. 45B). A much higher percentage of dead (PI⁺/AnnV⁺) cells was observed in (FwtFRBC9/MC.FvFv) modified T cells (60%) than in i9+CARζ+MC-T cells (20%) 48 hours post-drug treatment, consistent with the high caspase activation level independently observed at later time points in (FwtFRBC9/MC.FvFv) modified T cells using an IncuCyte-based caspase assay. To examine the on-switch, which was activated by rimiducid-induced dimerization of MC.FKBP_{V}.FKBP_{V} (MCFvFv), iMC+CARζ-T and (FwtFRBC9/MC.FvFv) T cells were treated with various rimiducid concentrations, and IL-2 and IL-6 cytokine release was analyzed by ELISA (FIG. 45C). While iMC+CARζ-T cells showed inducible IL-2 and IL-6 production with increasing rimiducid concentration, cytokine production by (FwtFRBC9/MC.FvFv) T cells was relatively weaker. Basal, ligand-independent IL-6 production by i9+CARζ+MC (with MC) was present at a similar level to that of rimiducid-stimulated iMC+CARζT cells. i9+CARζ+MC

[0816] High basal caspase activity could present a manufacturing challenge during viral or T cell production. Therefore, the ability of caspase-9 inhibitor, Q-LEHD-OPh (SEQ ID NO: 2364), to counteract basal caspase activity was assayed. Activated iC9 and iRC9 (FwtFRBC9) can be efficiently inhibited with Q-LEHD-OPh (SEQ ID NO: 2364), which did not appear to be toxic to the T cells at levels as high as 100 μM (FIG. 46). Furthermore, as low as 4 μM Q-LEHD-OPh (SEQ ID NO: 2364) was able to efficiently inhibit caspase-9 activation by iC9 and iRC9 (FwtFRBC9) when they were incubated with 20 nM of the respective activating ligands (FIG. 46C).

[0817] Another approach to attenuate high basal caspase activity is to utilize the FRB-T2098L (“FRB_{L}”) mutant that destabilizes protein expression in the iRC9 (FwtFRBC9) construct (15, 16). Additionally, a caspase-9 mutant (N405Q, ΔCasp9_{Q}) also reduces basal caspase activity in iC9. When investigated using the IncuCyte and caspase 3/7 green reagent, both FRB_{L} and Δcasp9_{Q} mutant iRC9 (FwtFRBC9) exhibited lower basal caspase activity compared to wild-type iRC9 (FwtFRBC9) (FIG. 47A). However, changing FRB from the wild-type (Threonine 2098) to the FRB_{L} mutant (Leucine 2098) reduced the maximum killing efficiency by iRC9 (FwtFRBC9) by approximately 50%. Similarly, changing Δcaspase-9 from wt to the N405Q mutant diminished iRC9 (FwtFRBC9) activity to even lower levels than the FRB_{L} mutation.

### Efficiency of Apoptosis Induction by Dimerizer Mediated Binding or Indirect Recruitment to a Scaffold

[0818] In this example, an inducible Caspase-9 polypeptide, comprising an FRB region (iFRBC9) was tested in modified cells that also expressed MC.FvFv. Here, in iRC9, rapamycin-induced dimerization of FRB.ΔC9 relies solely on the FKBP-based scaffold provided by the tandem FKBP12 proteins in MC.FKBP_{V}.FKBP_{V} (iMC) co-expressed within the same construct (see FIG. 48A for schematic). In this strategy, recruitment of multiple iFRBC9 molecules to the scaffold of FKBPs (e.g., scaffold of FKBP12v36s) facilitates their indirect spontaneous association and activation. To directly compare the extent of caspase activation between iC9 (pBP0844), iRC9 (pBP1116), and iRC9 (pBP1300), activated T cells were transduced with retrovirus encoding iMC+CARζ-T, i9+CARζ+MC, iFRBC9 and MC.FvFv, or (FwtFRBC9/MC.FvFv) and treated with no drug, 20 nM rapamycin or 20 nM rimiducid and cultured in the presence of caspase 3/7 green reagent (FIG. 48B-D). Although there was generally low basal caspase activity in all of the constructs, cells transduced with (FwtFRBC9/MC.FvFv) exhibited the highest basal caspase activity relative to the other CAR T cells (FIG. 48B). When induced with 20 nM rapamycin, (iFRBC9 and MC.FvFv) demonstrated modest caspase activation, while there was robust induction of caspase activity in T cells (FwtFRBC9/MC.FvFv). (FIG. 48C). This induction of apoptosis was similar in T cells expressing i9+CARζ+MC treated with 20 nM rimiducid (FIG. 48D). In this assay, 20 nM rimiducid was unable to induce dimerization of FKBP.FRB.Δcasp9 (iRC9). This is because of the 1000-fold reduction in affinity of rimiducid for wild-type FKBP present in iRC9 (iFwtFRBC9) relative to FKBP_{V36}.

### Whole Animal Model Assays

[0819] To demonstrate the functionality of iRC9 (FwtFRBC9) in vivo, NOD-Scid-IL-2Receptor^{-/-} mice (NSG, Jackson Labs) were injected i.v. with 1×10⁷ iMC+CARζ-T, i9+CARζ+MC, iFRBC9 and MC.FvFv or (FwtFRBC9/MC.FvFv) T cells co-transduced with GFP-FFluc per mouse. Bioluminescence imaging (BLI) of CAR T cells was assessed 18 hours (˜18 h) prior to drug treatment, immediately before drug treatment (0 h) and 4.5 h, 18 h, 27 h, and 45 h post-drug treatment (FIGS. 49A & B). A subset of mice that received i9+CARζ+MC T cell injections were treated i.p. with 5 mg/kg rimiducid, while a subset of mice that received iMC+CARζ-T, (iFRBC9 and MC.FvFv) and −2.0 T cells were treated i.p. with 10 mg/kg rapamycin. All other mice received vehicle only i.p. At 45 h post-drug treatment, mice were euthanized, and blood and spleen were collected for flow cytometry analysis with antibodies to human (h) CD3 or CD34, and murine (m) CD45. Similar to iC9,iRC9 (iFwtFRBC9) quickly and efficiently eliminated FwtFRBC9/MC.FvFv T cells as assessed by BLI and analysis of blood and spleen tissues (FIGS. 49C & D). Induction of (iFRBC9 and MC.FvFv) T cell apoptosis was modest with delayed kinetics compared to i9+CARζ+MC and FwtFRBC9/MC.FvFv, consistent with in vitro cell death data presented in FIG. 48.

### FwtFRBC9/MC.FvFv Contains a Dual Costimulatory on Switch and Apoptotic Off Switch

[0820] To examine the functionality of both on- and off-switches in the FwtFRBC9/MC.FvFv construct in the presence of target tumor cells, T cells were labeled with GFP-FFluc (expressing a Green Fluorescent Protein fused with firefly luciferase as a cell marker in vivo) and co-transduced with PSCA-iMC+CARζ-T (pBP0189), i9+CARζ+MC (pBP0873), or FwtFRBC9/MC.FvFv (pBP1308)-encoding vectors (FIG. 50). Ten days post-transduction, T cells were seeded into 96-well plates at 1:2 and 1:5 effector to tumor target (E:T) ratios with H PAC pancreatic carcinoma cells constitutively labeled with RFP in the presence of 0, 2, or 10 nM rimiducid and placed in the IncuCyte machine to monitor the kinetics of HPAC-RFP and T cell-GFP growth. Two days post-seeding, culture supernatant was analyzed for IL-2, IL-6, and IFN-γ production by ELISA. Overall, iMC+CARζ-T cells produced approximately 3-fold higher levels of IL-2, IL-6, and IFN-γ compared to FwtFRBC9/MC.FvFv T cells at all rimiducid concentrations and both E:T ratios (FIGS. 50A & B). Additionally, the basal activity of the MC co-stimulatory component in the i9+CARζ+MC construct induced IL-6 and IFN-γ cytokine production at similar levels to that measured in rimiducid-stimulated iMC+CARζ-T cells. As seen in FIGS. 50C & D, less than 5% and 10% HPAC-RFP cells remained at 1:2 and 1:5 ratios, respectively. While (FwtFRBC9/MC.FvFv) T cells demonstrated rimiducid-dependent tumor cell killing at both ratios, iMC+CARζ-T cells appear to be rimiducid-independent at these ratios and of similar target killing efficiency as i9+CARζ+MC T cells. When analyzed for T cell expansion, FwtFRBC9/MC.FvFv.0 T cells proliferated and expanded with increasing rimiducid concentration, while iMC+CARζ-T cells were not able to expand to the same extent following 10 nM rimiducid stimulation. Administration of 10 nM rapamycin on day 7 of co-culture resulted in the elimination of more than 60% of (FwtFRBC9/MC.FvFv) T cells within 24 hours while 10 nM rimiducid caused reduction of approximately 50% of i9+CARζ+MC T cells, suggesting that the safety switch is also functional in FwtFRBC9/MC.FvFv.

### Caspase-9 Activation in FwtFRBC9/MC.FvFv

[0821] Activation of iRC9 (iFwtFRBC9) within the FwtFRBC9/MC.FvFv-modified T cells could be mediated by both FKBP.FRB.ΔC9 homo-dimerization and scaffold-mediated recruitment driven by recruitment of FRB in FKBP.FRB.C9 to FKBP in MC.FKBP_{V}.FKBP_{V}. To disrupt the ability of iRC9 (iFwtFRBC9) from being activated by scaffold-mediated recruitment, FwtFRBC9/MC.FvFv-related family vectors were generated containing MC.FKBP_{V}.FKBP_{V} (pBP1308, “iMC”), MC.FKBP_{V} (pBP1319, 1 FKBP_{V}), MC (pBP1320, no FKBPs), and MC.FKBP_{V}.FKBP (pBP1321, 1 FKBP_{V} and 1 non-AP1903-binding wild-type FKBP) (see FIG. 51A for schematic of the constructs). PSCA-i9+CARζ+MC vector (pBP0873) served as a positive control for the off-switch and the CD19-iMC+CARζ-T vectors (pBP0608 with MC.FKBP_{V}.FKBP_{V} & pBP1439 with MC.FKBP_{V}) served as positive controls for the on-switch. Protein expression of the CAR-T cells using an anti-MyD88 antibody was determined. Removing 1 copy of FKBP_{V} from iMC resulted in increased MC fusion-protein expression in the FwtFRBC9/MC.FvFv platform (compare pBP1308 versus pBP1319) and the iMC+CARζ-T platform (compare pBP0608 versus pBP1439) (FIG. 51B). However, MC expression was reduced in the construct that contains MC.FKBP_{V}.FKBP (compare pBP1319 versus pBP1321), suggesting that the additional FKBP domain destabilized the MC-fusion protein. Most interestingly, the expression pattern of the i9+CARζ+MC platform constructs (i.e., pBP0873 containing iC9 and pBP1320 containing iRC9 (iFwtFRBC9)) reveal additional slow migrating bands when probed with anti-MyD88 antibody. In addition to the predicted 27 kDa MC fusion protein band, there are 3 additional bands detected at 90, 80 and 50 kDa. Based on the high basal MC signaling in i9+CARζ+MC vectors, this data may support the hypothesis that there is incomplete protein separation at the 2^{nd} “2A” site, resulting in the following candidate protein products: αPSCA.Q.CD8stm.ζ.2A-MC and CD8stm.ζ.2A-MC with the latter losing the scFv domain. In terms of caspase-9-fusion protein expression, there was no marked difference in chimeric caspase protein levels between the different variations of MC-fusion proteins (compare pBP1308, pBP1319, pBP1320, and pBP1321).

[0822] To test the off-switch, T cells transduced with the above vectors were subjected to a caspase activation assay with treatment of 0, 0.8, 4, 20 nM rapamycin. T cells transduced with the i9+CARζ+MC vector (pBP0873) were treated with rimiducid. Caspase activation 24 hours post-rapamycin (or rimiducid) exposure was determined and depicted by line graphs (FIG. 51C). Removing 1 copy of FKBP_{V} from iMC actually resulted in improved caspase activation in the FwtFRBC9/MC.FvFv platform (iFwtFRBC9) (compare pBP1308 versus pBP1319). When both copies of FKBP_{V} were removed, caspase activity resembled that of iC9 in terms of kinetics, but at much higher amplitude (compare pBP0873 versus pBP1320). In the construct that contains MC.FKBP_{V}.FKBP, caspase activity reverted to a level comparable to that in the construct encoding original “iMC” MC.FKBP_{V}.FKBP_{V} (compare pBP1308 versus pBP1321).

Topology of FRB and FKBP in iRC9 (iFwtFRBC9)

[0823] Since the order and spacing of signaling elements and binding domains might possibly affect outcomes, the order of ligand-binding domains with the iFwtFRBC9 molecules was tested. The iRC9 (iFwtFRBC9) discussed above contained an amino terminal FKBP followed by a FRB domain, as in FKBP.FRB.ΔC9 (pBP1308 and pBP1311). To investigate the efficacy of the opposite configuration, FRB.FKBP.ΔC9/(pBP1310) was constructed (FIG. 51A). A caspase activation assay revealed that FRB.FKBP.ΔC9 was slightly more sensitive than FKBP.FRB.ΔC9 in terms of rapamycin-initiated apoptosis (FIG. 51D). This modest difference is consistent with the higher FRB.FKBP.ΔC9 protein levels compared to the FKBP.FRB.ΔC9 (FIG. 51B). Furthermore, since these two plasmids do not contain the dilutive iMC-associated scaffold, these data also provide evidence that iRC9 does not require scaffold to potently activate caspase signaling. In terms of the on-switch, all FwtFRBC9/MC.FvFv constructs (pBP1308, pBP1319, and pBP1321) exhibit low IL-2 and IL-6 cytokine production in the absence of tumor even when stimulated with rimiducid, while the rimiducid-inducible iMC+CARζ-T constructs (pBP0608 and pBP1439) demonstrate ligand-dependent activation, as expected (FIG. 51E). Moreover, both of the i9+CARζ+MC constructs, containing MC (pBP0873 and pBP1320), induce high basal IL-6 production.

[0824] Since iRC9 contains the wild-type FKBP domain, the concentration of rimiducid capable of triggering dimerization and iRC9 activation was assayed to gauge the therapeutic window of safety for using rimiducid as a T cell stimulatory drug. In this assay, 293 cells were transiently transfected with vectors expressing iC9 and the two similar iRC9 variants (FRB.FKBP.ΔC9 and FKBP.FRB.ΔC9) (FIG. 52) and treated with half-log dilution of either rapamycin or rimiducid. Cells were subjected to either the caspase activation assay in the presence of caspase 3/7 green reagent and monitored by IncuCyte (FIG. 52A) or the secreted alkaline phosphatase (SEAP) assay using the constitutive SRα reporter (FIG. 52B). For FIG. 52B left graph, the lines of the graph, as indicated at the 10³ point of the x-axis are, from top to bottom, negative control, FKBP.FRB.C9, FRB.FKBP.C9, iC9. For FIG. 52B right graph, the lines of the graphat the 10³ point of the x-axis are, from top to bottom negative control, iC9, FKBP.FRB.C9, and FRB.FKBP.C9.

[0825] Functionally, iRC9 and iC9 appeared to induce caspase cleavage with similar kinetics and threshold when activated by their respective suicide drugs. iRC9 was highly active even in the presence of as little as 100 μM rapamycin, with some efficacy at even lower drug levels albeit with reduced kinetics. When comparing FRB.FKBP.ΔC9 versus FKBP.FRB.ΔC9, FRB.FKBP.ΔC9 was active at lower rapamycin concentration than FKBP.FRB.ΔC9, consistent with data obtained in FIG. 51D. Furthermore, iRC9 was insensitive to rimiducid below 100 nM, which provides a large window of safety to use rimiducid to induce T cell activation (generally at 1 to 10 nM). This experiment also demonstrates that (iFwtFRBC9) is a potent activator of apoptosis that is independent of scaffolding-induced dimerization provided by MC.FvFv.

### MC-Rap: An Inducible Costimulatory Polypeptide Directed by Rapamycin Analogs

[0826] To demonstrate the versatility of utilizing tandem fusion of FKBP and FRB to facilitate homodimerization with rapamycin or rapalogs a MC-Rap (iFRBFwtMC) construct was made, which had a MyD88/CD40 fusion with wild-type FKBP and FRB_{L}. MC-Rap was expressed together with a CAR directed against CD19 with the two cistrons separated by a 2A sequence (FIG. 53). With this construct, a rapalog was chosen to bind to the wild-type FKBP present on MC-Rap and together facilitate dimerization with the FRB present on a second MC-Rap. To determine if dimerization of MC-Rap with this technique could direct activation of MC and costimulatory function, retroviral construct 1440 containing MC-Rap was compared with two iMC+CARζ constructs containing the same CAR but which include two tandem copies of rimiducid sensitive Fv or an uninducible MC only construct (1151). When transduced into T cells, the expression of IL-6 which relies on MC function was observed at moderate levels with MC activity alone and was not induced with either the rapalog C7-isobutyloxyrapamycin or rimiducid (FIG. 54). IL-6 induction from the iMC+CARζ-T cells containing either BP0774 with Fv.Fv fused to the carboxy terminus of MC or BP1433 with amino terminal Fv fusions secreted high levels of IL-6 in the presence of but not with isobutyloxyrapamycin. The term “tethered” in FIG. 54 refers to FRB and FKBP polypeptides tethered to a MyD88-CD40 polypeptide. In contrast, BP1440 which expresses MC with a carboxy terminal fusion of wild-type FKBP in tandem with FRB_{L} was not responsive to rimiducid, but strongly induces IL-6 secretion by activation of MC. When probed with an antibody to MyD88 in a western blot, the expression levels of MC.FK_{WT}.FRB_{L} were similar to those expressed by 1433 (also a carboxyl terminal fusion but with Fᵥs) and MC alone (FIG. 55). The dose responsiveness of the iMC+CARζ and MC-Rap-CAR constructs was determined in a sensitive reporter assay in which signaling through MC activates the transcription factor NF-KB (FIG. 56). BP774 was strongly induced by subnanomolar concentrations of rimiducid but not by rapamycin or isobutyloxyrapamycin. In contrast subnanomolar concentrations of rapamycin or isobutyloxyrapamycin were sufficient to induce MC-Rap in BP1440 but rimiducid even at 50 nM remained inert to MC function because of the specificity of the drug for Fᵥ.

(FRBFwtMC/FvC9): A Dual-Switch Activating Costimulation with Rapalog and Apoptosis with Rimiducid

[0827] The specificity of MC-Rap for activation with rapalogs but not with rimiducid permitted its employment as a second dual-switch (FRBFwtMC/FvC9) (FIG. 57). In this strategy MC-Rap was coexpressed with a first generation CAR and iC9. Rimiducid was used to activate caspase-9 as a safety switch while the rapalog isobutyloxyrapamycin which binds with FRB_{L} at concentrations 20 fold lower than the wild-type FRB in mTOR (which would inhibit T cell function) can specifically activate MC-Rap. This scheme was the reverse of (FwtFRBC9/MC.FvFv) which activates apoptosis with rapamycin (or rapalog) and activates costimulation with iMC and rimiducid. The drug specificity of the two strategies was demonstrated in a cell killing assay in culture (FIG. 58). The i9+CARζ+MC construct BP0844 which encodes a CD19CAR with iC9 and a constitutive or BP1160 expressing FRBFwtMC/FvC9 or BP1300 expressing FwtFRBC9/MC.FvFv was cocultured with the Raji Burkitt lymphoma cell line that expresses CD19. Tumor killing was ablated by activation of the safety switch with rimiducid both with the i9+CARζ+MC or FRBFwtMC/FvC9 formats. In contrast rapamycin or isobutyloxyrapamycin activated the iRC9 in FwtFRBC9/MC.FvFv and specifically ablated the immune response to tumor.

### REFERENCES

[0828] The following references are referred to in the present Example, and are hereby incorporated by reference herein in the present application, in their entireties.
[0829] 1. Straathof K C, Pule M A, Yotnda P, Dotti G, Vanin E F, Brenner M K, Heslop H E, Spencer D M, and Rooney C M. An inducible caspase 9 safety switch for T-cell therapy. Blood. 2005; 105(11):4247-54.
[0830] 2. Fan L, Freeman K W, Khan T, Pham E, and Spencer D M. Improved artificial death switches based on caspases and FADD. Hum Gene Ther. 1999; 10(14):2273-85.
[0831] 3. Spencer D M, Wandless T J, Schreiber S L, and Crabtree G R. Controlling signal transduction with synthetic ligands. Science. 1993; 262(5136):1019-24.
[0832] 4. Acevedo V D, Gangula R D, Freeman K W, Li R, Zhang Y, Wang F, Ayala G E, Peterson L E, Ittmann M, and Spencer D M. Inducible FGFR-1 activation leads to irreversible prostate adenocarcinoma and an epithelial-to-mesenchymal transition. Cancer Cell. 2007; 12(6):559-71.
[0833] 5. Spencer D M, Belshaw P J, Chen L, Ho S N, Randazzo F, Crabtree G R, and Schreiber S L. Functional analysis of Fas signaling in vivo using synthetic inducers of dimerization. Curr Biol. 1996; 6(7):839-47.
[0834] 6. Strasser A, Cory S, and Adams J M. Deciphering the rules of programmed cell death to improve therapy of cancer and other diseases. EMBO J. 2011; 30(18):3667-83.
[0835] 7. Narayanan P, Lapteva N, Seethammagari M, Levitt J M, Slawin K M, and Spencer D M. A composite MyD88/CD40 switch synergistically activates mouse and human dendritic cells for enhanced antitumor efficacy. J Clin Invest. 2011; 121(4):1524-34.
[0836] 8. Sabatini D M, Erdjument-Bromage H, Lui M, Tempst P, and Snyder S H. RAFT1: a mammalian protein that binds to FKBP12 in a rapamycin-dependent fashion and is homologous to yeast TORs. Cell. 1994; 78(1):35-43.
[0837] 9. Brown E J, Albers M W, Shin T B, Ichikawa K, Keith C T, Lane W S, and Schreiber S L. A mammalian protein targeted by G1-arresting rapamycin-receptor complex. Nature. 1994; 369(6483):756-8.
[0838] 10. Chen J, Zheng X F, Brown E J, and Schreiber S L. Identification of an 11-kDa FKBP12-rapamycin-binding domain within the 289-kDa FKBP12-rapamycin-associated protein and characterization of a critical serine residue. Proc Natl Acad Sci USA. 1995; 92(11):4947-51.
[0839] 11. Choi J, Chen J, Schreiber S L, and Clardy J. Structure of the FKBP12-rapamycin complex interacting with the binding domain of human FRAP. Science. 1996; 273(5272):239-42.
[0840] 12. Ho S N, Biggar S R, Spencer D M, Schreiber S L, and Crabtree G R. Dimeric ligands define a role for transcriptional activation domains in reinitiation. Nature. 1996; 382(6594):822-6.
[0841] 13. Klemm J D, Beals C R, and Crabtree G R. Rapid targeting of nuclear proteins to the cytoplasm. Curr Biol. 1997; 7(9):638-44.
[0842] 14. Bayle J H, Grimley J S, Stankunas K, Gestwicki J E, Wandless T J, and Crabtree G R. Rapamycin analogs with differential binding specificity permit orthogonal control of protein activity. Chem Biol. 2006; 13(1):99-107.
[0843] 15. Stankunas K, Bayle J H, Gestwicki J E, Lin Y M, Wandless T J, and Crabtree G R. Conditional protein alleles using knockin mice and a chemical inducer of dimerization. Mol Cell. 2003; 12(6):1615-24.
[0844] 16. Stankunas K, Bayle J H, Havranek J J, Wandless T J, Baker D, Crabtree G R, and Gestwicki J E. Rescue of Degradation-Prone Mutants of the FK506-Rapamycin Binding (FRB) Protein with Chemical Ligands. Chembiochem. 2007.
[0845] 17. Liberles S D, Diver S T, Austin D J, and Schreiber S L. Inducible gene expression and protein translocation using nontoxic ligands identified by a mammalian three-hybrid screen. Proc Natl Acad Sci USA. 1997; 94(15):7825-30.
[0846] 18. Luengo J I, Yamashita D S, Dunnington D, Beck A K, Rozamus L W, Yen H K, Bossard M J, Levy M A, Hand A, Newman-Tarr T, et al. Structure-activity studies of rapamycin analogs: evidence that the C-7 methoxy group is part of the effector domain and positioned at the FKBP12-FRAP interface. Chem Biol. 1995; 2(7):471-81.

### APPENDICES TO THE PRESENT EXAMPLE

APPENDIX 1
pBP1300--pSFG-FKBP.FRB.ΔC9.T2A-αCD19.Q.CD8stm.ζ.P2A-iMC

| | | | | SEQ |
|---|---|---|---|---|
| | | SEQ ID | | ID |
| Fragment | Nucleotide | NO: | Peptide | NO: |
| Leader | ATGCtcgagcaattg | 926 | MLEQL | 927 |
| peptide | | | | |
| FKBP″ (wt) | GGcGTGCAaGTGGAaACTATaAGCCCg | 928 | GVQVETISPGDGRTFPKRGQTCVVHYT | 929 |
| | GGAGAcGGCcGcACATTtCCCAAgAGA | | GMLEDGKKFDSSRDRNKPFKFMLGKQ | |
| | GGcCAGACcTGCGTgGTGCAcTATACa | | EVIRGWEEGVAQMSVGQRAKLTISPDY | |
| | GGAATGCTGGAgGACGGgAAGAAaTT | | AYGATGHPGIIPPHATLVFDVELLKLE | |
| | CGAtAGCtcCCGGGAtCGAAAtAAGCCtT | | | |
| | TCAAaTTCATGCTGGGcAAGCAaGAAG | | | |
| | TcATCaGaGGCTGGGAaGAAGGcGTC | | | |
| | GCcCAGATGTCcGTGGGtCAGcGcGCC | | | |
| | AAgCTGACaATTAGtCCAGAtTACGCcT | | | |
| | ATGGcGCAACaGGCCAtCCCGGcATCA | | | |
| | TcCCCCCaCATGCcACACTcGTCTTtGA | | | |
| | TGTcGAGCTcCTGAAaCTGGAg | | | |
| Linker | GGCGGGcaattg | 930 | gggl | 931 |
| FRB | gaaatgTGGCATGAAGGGTTGGAAGAA | 932 | EMWHEGLEEASRLYFGERNVKGMFEV | 933 |
| | GCTTCAAGGCTGTACTTCGGAGAGAG | | LEPLHAMMERGPQTLKETSFNQAYGR | |
| | GAACGTGAAGGGCATGTTTGAGGTTC | | DLMEAQEWCRKYMKSGNVKDLTQAW | |
| | TTGAACCTCTGCACGCCATGATGGAA | | DLYYHVFRRISK | |
| | CGGGGACCGCAGACACTGAAAGAAA | | | |
| | CCTCTTTTAATCAGGCCTACGGCAGA | | | |
| | GACCTGATGGAGGCCCAAGAATGGT | | | |
| | GTAGAAAGTATATGAAATCCGGTAAC | | | |
| | GTGAAAGACCTGactCAGGCCTGGGA | | | |
| | CCTTTATTACCATGTGTTCAGGCGGAT | | | |
| | CAGTAAG | | | |
| Linker | TCAGGCGGTGGCTCAGGTccatgg | 934 | SGGGSGPW | 935 |
| Δcaspase9 | GGATTTGGTGATGTCGGTGCTCTTGA | 936 | GFGDVGALESLRGNADLAYILSMEPCG | 937 |
| | GAGTTTGAGGGGAAATGCAGATTTGG | | HCLIINNVNFCRESGLRTRTGSNIDCEK | |
| | CTTACATCCTGAGCATGGAGCCCTGT | | LRRRFSSLHFMVEVKGDLTAKKMVLAL | |
| | GGCCACTGCCTCATTATCAACAATGT | | LELARQDHGALDCCVVVILSHGCQASH | |
| | GAACTTCTGCCGTGAGTCCGGGCTCC | | LQFPGAVYGTDGCPVSVEKIVNIFNGTS | |
| | GCACCCGCACTGGCTCCAACATCGAC | | CPSLGGKPKLFFIQACGGEQKDHGFEV | |
| | TGTGAGAAGTTGCGGCGTCGCTTCTC | | ASTSPEDESPGSNPEPDATPFQEGLRT | |
| | CTCGCTGCATTTCATGGTGGAGGTGA | | FDQLDAISSLPTPSDIFVSYSTFPGFVS | |
| | AGGGCGACCTGACTGCCAAGAAAATG | | WRDPKSGSWYVETLDDIFEQWAHSED | |
| | GTGCTGGCTTTGCTGGAGCTGGCGCg | | LQSLLLRVANAVSVKGIYKQMPGCFNF | |
| | GCAGGACCACGGTGCTCTGGACTGC | | LRKKLFFKTSASRA | |
| | TGCGTGGTGGTCATTCTCTCTCACGG | | | |
| | CTGTCAGGCCAGCCACCTGCAGTTCC | | | |
| | CAGGGGCTGTCTACGGCACAGATGG | | | |
| | ATGCCCTGTGTCGGTCGAGAAGATTG | | | |
| | TGAACATCTTCAATGGGACCAGCTGC | | | |
| | CCCAGCCTGGGAGGGAAGCCCAAGC | | | |
| | TCTTTTTCATCCAGGCCTGTGGTGGG | | | |
| | GAGCAGAAAGAtCATGGGTTTGAGGT | | | |
| | GGCCTCCACTTCCCCTGAAGACGAGT | | | |
| | CCCCTGGCAGTAACCCCGAGCCAGAT | | | |
| | GCCACCCCGTTCCAGGAAGGTTTGAG | | | |
| | GACCTTCGACCAGCTGGACGCCATAT | | | |
| | CTAGTTTGCCCACACCCAGTGACATC | | | |
| | TTTGTGTCCTACTCTACTTTCCCAGGT | | | |
| | TTTGTTTCCTGGAGGGACCCCAAGAG | | | |
| | TGGCTCCTGGTACGTTGAGACCCTGG | | | |
| | ACGACATCTTTGAGCAGTGGGCTCAC | | | |
| | TCTGAAGACCTGCAGTCCCTCCTGCT | | | |
| | TAGGGTCGCTAATGCTGTTTCGGTGA | | | |
| | AAGGGATTTATAAACAGATGCCTGGT | | | |
| | TGCTTTAATTTCCTCCGGAAAAAACTT | | | |
| | TTCTTTAAAACATCAGCTAGCAGAGCC | | | |
| Linker | ggatctggaccgcGG | 938 | GSGPR | 939 |
| T2A | GAAGGCCGAGGGAGCCTGCTGACAT | 940 | EGRGSLLTCGDVEENPGP | 941 |
| | GTGGCGATGTGGAGGAAAACCCAGG | | | |
| | ACCA | | | |
| Linker | CCATGG | 942 | PW | 943 |
| Signal | ATGGAGTTTGGACTTTCTTGGTTGTTT | 944 | MEFGLSWLFLVAILKGVQCSR | 945 |
| Peptide | TTGGTGGCAATTCTGAAGGGTGTCCA | | | |
| | GTGTAGCAGG | | | |
| FMC63 VL | GACATCCAGATGACACAGACTACATC | 946 | DIQMTQTTSSLSASLGDRVTISCRASQD | 947 |
| | CTCCCTGTCTGCCTCTCTGGGAGACA | | ISKYLNWYQQKPDGTVKLLIYHTSRLHS | |
| | GAGTCACCATCAGTTGCAGGGCAAGT | | GVPSRFSGSGSGTDYSLTISNLEQEDIA | |
| | CAGGACATTAGTAAATATTTAAATTGG | | TYFCQQGNTLPYTFGGGTKLEIT | |
| | TATCAGCAGAAACCAGATGGAACTGT | | | |
| | TAAACTCCTGATCTACCATACATCAAG | | | |
| | ATTACACTCAGGAGTCCCATCAAGGT | | | |
| | TCAGTGGCAGTGGGTCTGGAACAGAT | | | |
| | TATTCTCTCACCATTAGCAACCTGGAG | | | |
| | CAAGAAGATATTGCCACTTACTTTTGC | | | |
| | CAACAGGGTAATACGCTTCCGTACAC | | | |
| | GTTCGGAGGGGGGACTAAGTTGGAA | | | |
| | ATAACA | | | |
| Flex | GGCGGAGGAAGCGGAGGTGGGGGC | 948 | gggsgggg | 949 |
| FMC63 VH | GAGGTGAAACTGCAGGAGTCAGGAC | 950 | EVKLQESGPGLVAPSQSLSVTCTVSGV | 951 |
| | CTGGCCTGGTGGCGCCCTCACAGAG | | SLPDYGVSWIRQPPRKGLEWLGVIWGS | |
| | CCTGTCCGTCACATGCACTGTCTCAG | | ETTYYNSALKSRLTIIKDNSKSQVFLKM | |
| | GGGTCTCATTACCCGACTATGGTGTA | | NSLQTDDTAIYYCAKHYYYGGSYAMDY | |
| | AGCTGGATTCGCCAGCCTCCACGAAA | | WGQGTSVTVSS | |
| | GGGTCTGGAGTGGCTGGGAGTAATAT | | | |
| | GGGGTAGTGAAACCACATACTATAAT | | | |
| | TCAGCTCTCAAATCCAGACTGACCAT | | | |
| | CATCAAGGACAACTCCAAGAGCCAAG | | | |
| | TTTTCTTAAAAATGAACAGTCTGCAAA | | | |
| | CTGATGACACAGCCATTTACTACTGT | | | |
| | GCCAAACATTATTACTACGGTGGTAG | | | |
| | CTATGCTATGGACTACTGGGGTCAAG | | | |
| | GAACCTCAGTCACCGTCTCCTCA | | | |
| Linker | GGATCC | 952 | gs | 953 |
| CD34 | GAACTTCCTACTCAGGGGACTTTCTC | 954 | ELPTQGTFSNVSTNVS | 955 |
| epitope | AAACGTTAGCACAAACGTAAGT | | | |
| CD8 stalk | CCCGCCCCAAGACCCCCCACACCTG | 956 | PAPRPPTPAPTIASQPLSLRPEACRPAA | 957 |
| | CGCCGACCATTGCTTCTCAACCCCTG | | GGAVHTRGLDFACD | |
| | AGTTTGAGACCCGAGGCCTGCCGGC | | | |
| | CAGCTGCCGGCGGGGCCGTGCATAC | | | |
| | AAGAGGACTCGATTTCGCTTGCGAC | | | |
| CD8 | ATCTATATCTGGGCACCTCTCGCTGG | 958 | IYIWAPLAGTCGVLLLSLVITLYCNHRNR | 959 |
| transmembrane | CACCTGTGGAGTCCTTCTGCTCAGCC | | RRVCKCPR | |
| | TGGTTATTACTCTGTACTGTAATCACC | | | |
| | GGAATCGCCGCCGCGTTTGTAAGTGT | | | |
| | CCCAGG | | | |
| Linker | GTCGAC | 960 | VD | 961 |
| CD3ζ | AGAGTGAAGTTCAGCAGGAGCGCAG | 962 | RVKFSRSADAPAYQQGQNQLYNELNL | 963 |
| | ACGCCCCCGCGTACCAGCAGGGCCA | | GRREEYDVLDKRRGRDPEMGGKPRRK | |
| | GAACCAGCTCTATAACGAGCTCAATC | | NPQEGLYNELQKDKMAEAYSEIGMKGE | |
| | TAGGACGAAGAGAGGAGTACGATGTT | | RRRGKGHDGLYQGLSTATKDTYDALH | |
| | TTGGACAAGAGACGTGGCCGGGACC | | MQALPPR | |
| | CTGAGATGGGGGGAAAGCCGAGAAG | | | |
| | GAAGAACCCTCAGGAAGGCCTGTACA | | | |
| | ATGAACTGCAGAAAGATAAGATGGCG | | | |
| | GAGGCCTACAGTGAGATTGGGATGAA | | | |
| | AGGCGAGCGCCGGAGGGGCAAGGG | | | |
| | GCACGATGGCCTTTACCAGGGTCTCA | | | |
| | GTACAGCCACCAAGGACACCTACGAC | | | |
| | GCCCTTCACATGCAAGCTCTTCCACC | | | |
| | TCGT | | | |
| Linker | gGAACGCGTGGATCGGGA | 964 | GTRGSG | 965 |
| P2A | GCTACTAACTTCAGCCTGCTGAAGCA | 966 | ATNFSLLKQAGDVEENPGP | 967 |
| | GGCTGGAGACGTGGAGGAGAACcccg | | | |
| | ggcct | | | |
| MyD88 | atggctgcaggaggtcccggcgcggggtctgcggcc | 968 | MAAGGPGAGSAAPVSSTSSLPLAALN | 969 |
| | ccggtctcctccacatcctcccttcccctggctgctctca | | MRVRRRLSLFLNVRTQVAADWTALAEE | |
| | acatgcgagtgcggcgccgcctgtctctgttcttgaacg | | MDFEYLEIRQLETQADPTGRLLDAWQG | |
| | tgcggacacaggtggcggccgactggaccgcgctgg | | RPGASVGRLLDLLTKLGRDDVLLELGP | |
| | cggaggagatggactttgagtacttggagatccggca | | SIEEDCQKYILKQQQEEAEKPLQVAAVD | |
| | actggagacacaagcggaccccactggcaggctgct | | SSVPRTAELAGITTLDDPLGHMPERFDA | |
| | ggacgcctggcagggacgccctggcgcctctgtagg | | FICYCPSDI | |
| | ccgactgctcgatctgcttaccaagctgggccgcgacg | | | |
| | acgtgctgctggagctgggacccagcattgaggagg | | | |
| | attgccaaaagtatatcttgaagcagcagcaggagga | | | |
| | ggctgagaagcctttacaggtggccgctgtagacagc | | | |
| | agtgtcccacggacagcagagctggcgggcatcacc | | | |
| | acacttgatgaccccctggggcatatgcctgagcgtttc | | | |
| | gatgccttcatctgctattgccccagcgacatc | | | |
| Linker | gtcgag | 970 | VE | 971 |
| CD40 | aaaaaggtggccaagaagccaaccaataaggcccc | 972 | KKVAKKPTNKAPHPKQEPQEINFPDDL | 973 |
| | ccaccccaagcaggagccccaggagatcaattttccc | | PGSNTAAPVQETLHGCQPVTQEDGKE | |
| | gacgatcttcctggctccaacactgctgctccagtgcag | | SRISVQERQ | |
| | gagactttacatggatgccaaccggtcacccaggagg | | | |
| | atggcaaagagagtcgcatctcagtgcaggagagac | | | |
| | ag | | | |
| Linker | gtcgag | 974 | VE | 975 |
| FKBPᵥ′ | GGcGTcCAaGTcGAaACcATtagtCCcGG | 976 | GVQVETISPGDGRTFPKRGQTCVVHYT | 977 |
| | cGAtGGcaGaACaTTtCCtAAaaGgGGaC | | GMLEDGKKVDSSRDRNKPFKFMLGKQ | |
| | AaACaTGtGTcGTcCAtTAtACaGGcATGt | | EVIRGWEEGVAQMSVGQRAKLTISPDY | |
| | TgGAgGAcGGcAAaAAgGTgGAcagtagta | | AYGATGHPGIIPPHATLVFDVELLKLE | |
| | GaGAtcGcAAtAAaCCtTTcAAaTTcATGtT | | | |
| | gGGaAAaCAaGAaGTcATtaGgGGaTGG | | | |
| | GAgGAgGGcGTgGCtCAaATGtccGTcG | | | |
| | GcCAacGcGCtAAgCTcACcATcagcCCc | | | |
| | GAcTAcGCaTAcGGcGCtACcGGaCAtC | | | |
| | CcGGaATtATtCCcCCtCAcGCtACctTgG | | | |
| | TgTTtGAcGTcGAaCTgtTgAAgCTcGAa | | | |
| Linker | gtcgag | 978 | VE | 979 |
| FKBPᵥ | ggagtgcaggtggagactatctccccaggagacggg | 980 | GVQVETISPGDGRTFPKRGQTCVVHYT | 981 |
| | cgcaccttccccaagcgcggccagacctgcgtggtgc | | GMLEDGKKVDSSRDRNKPFKFMLGKQ | |
| | actacaccgggatgcttgaagatggaaagaaagttga | | EVIRGWEEGVAQMSVGQRAKLTISPDY | |
| | ttcctcccgggacagaaacaagccctttaagtttatgct | | AYGATGHPGIIPPHATLVFDVELLKLE | |
| | aggcaagcaggaggtgatccgaggctgggaagaag | | | |
| | gggttgcccagatgagtgtgggtcagagagccaaact | | | |
| | gactatatctccagattatgcctatggtgccactgggca | | | |
| | cccaggcatcatcccaccacatgccactctcgtcttcg | | | |
| | atgtggagcttctaaaactggaa | | | |
| STOP | TGA | 982 | stop | |

APPENDIX 2
pBP1308--pSFG-FKBP.FRB.ΔC9.T2A-αPSCA.Q.CD8stm.ζ.P2A-iMC

| | | SEQ | | SEQ |
|---|---|---|---|---|
| | | ID | | ID |
| Fragment | Nucleotide | NO: | Peptide | NO: |
| Leader | ATGCtcgagcaattg | 983 | MLEQL | 984 |
| peptide | | | | |
| FKBP″ (wt) | GGcGTGCAaGTGGAaACTATaAGCCCg | 985 | GVQVETISPGDGRTFPKRGQTCVVHYT | 986 |
| | GGAGAcGGCcGcACATTtCCCAAgAGA | | GMLEDGKKFDSSRDRNKPFKFMLGKQ | |
| | GGcCAGACcTGCGTgGTGCAcTATACa | | EVIRGWEEGVAQMSVGQRAKLTISPDY | |
| | GGAATGCTGGAgGACGGgAAGAAaTT | | AYGATGHPGIIPPHATLVFDVELLKLE | |
| | CGAtAGCtcCCGGGAtCGAAAtAAGCCtT | | | |
| | TCAAaTTCATGCTGGGcAAGCAaGAAG | | | |
| | TcATCaGaGGCTGGGAaGAAGGcGTC | | | |
| | GCcCAGATGTCcGTGGGtCAGcGcGCC | | | |
| | AAgCTGACaATTAGtCCAGAtTACGCcT | | | |
| | ATGGcGCAACaGGCCAtCCCGGcATCA | | | |
| | TcCCCCCaCATGCcACACTcGTCTTtGA | | | |
| | TGTcGAGCTcCTGAAaCTGGAg | | | |
| Linker | GGCGGGcaattg | 987 | ggql | 988 |
| FRB | gaaatgTGGCATGAAGGGTTGGAAGAA | 989 | EMWHEGLEEASRLYFGERNVKGMFEV | 990 |
| | GCTTCAAGGCTGTACTTCGGAGAGAG | | LEPLHAMMERGPQTLKETSFNQAYGR | |
| | GAACGTGAAGGGCATGTTTGAGGTTC | | DLMEAQEWCRKYMKSGNVKDLTQAW | |
| | TTGAACCTCTGCACGCCATGATGGAA | | DLYYHVFRRISK | |
| | CGGGGACCGCAGACACTGAAAGAAA | | | |
| | CCTCTTTTAATCAGGCCTACGGCAGA | | | |
| | GACCTGATGGAGGCCCAAGAATGGT | | | |
| | GTAGAAAGTATATGAAATCCGGTAAC | | | |
| | GTGAAAGACCTGactCAGGCCTGGGA | | | |
| | CCTTTATTACCATGTGTTCAGGCGGAT | | | |
| | CAGTAAG | | | |
| Linker | TCAGGCGGTGGCTCAGGTccatgg | 991 | SGGGSGPW | 992 |
| Δcaspase9 | GGATTTGGTGATGTCGGTGCTCTTGA | 993 | GFGDVGALESLRGNADLAYILSMEPCG | 994 |
| | GAGTTTGAGGGGAAATGCAGATTTGG | | HCLIINNVNFCRESGLRTRTGSNIDCEK | |
| | CTTACATCCTGAGCATGGAGCCCTGT | | LRRRFSSLHFMVEVKGDLTAKKMVLAL | |
| | GGCCACTGCCTCATTATCAACAATGT | | LELARQDHGALDCCVVVILSHGCQASH | |
| | GAACTTCTGCCGTGAGTCCGGGCTCC | | LQFPGAVYGTDGCPVSVEKIVNIFNGTS | |
| | GCACCCGCACTGGCTCCAACATCGAC | | CPSLGGKPKLFFIQACGGEQKDHGFEV | |
| | TGTGAGAAGTTGCGGCGTCGCTTCTC | | ASTSPEDESPGSNPEPDATPFQEGLRT | |
| | CTCGCTGCATTTCATGGTGGAGGTGA | | FDQLDAISSLPTPSDIFVSYSTFPGFVS | |
| | AGGGCGACCTGACTGCCAAGAAAATG | | WRDPKSGSWYVETLDDIFEQWAHSED | |
| | GTGCTGGCTTTGCTGGAGCTGGCGCg | | LQSLLLRVANAVSVKGIYKQMPGCFNF | |
| | GCAGGACCACGGTGCTCTGGACTGC | | LRKKLFFKTSASRA | |
| | TGCGTGGTGGTCATTCTCTCTCACGG | | | |
| | CTGTCAGGCCAGCCACCTGCAGTTCC | | | |
| | CAGGGGCTGTCTACGGCACAGATGG | | | |
| | ATGCCCTGTGTCGGTCGAGAAGATTG | | | |
| | TGAACATCTTCAATGGGACCAGCTGC | | | |
| | CCCAGCCTGGGAGGGAAGCCCAAGC | | | |
| | TCTTTTTCATCCAGGCCTGTGGTGGG | | | |
| | GAGCAGAAAGAtCATGGGTTTGAGGT | | | |
| | GGCCTCCACTTCCCCTGAAGACGAGT | | | |
| | CCCCTGGCAGTAACCCCGAGCCAGAT | | | |
| | GCCACCCCGTTCCAGGAAGGTTTGAG | | | |
| | GACCTTCGACCAGCTGGACGCCATAT | | | |
| | CTAGTTTGCCCACACCCAGTGACATC | | | |
| | TTTGTGTCCTACTCTACTTTCCCAGGT | | | |
| | TTTGTTTCCTGGAGGGACCCCAAGAG | | | |
| | TGGCTCCTGGTACGTTGAGACCCTGG | | | |
| | ACGACATCTTTGAGCAGTGGGCTCAC | | | |
| | TCTGAAGACCTGCAGTCCCTCCTGCT | | | |
| | TAGGGTCGCTAATGCTGTTTCGGTGA | | | |
| | AAGGGATTTATAAACAGATGCCTGGT | | | |
| | TGCTTTAATTTCCTCCGGAAAAAACTT | | | |
| | TTCTTTAAAACATCAGCTAGCAGAGCC | | | |
| Linker | ggatctggaccgcGG | 995 | GSGPR | 996 |
| T2A | GAAGGCCGAGGGAGCCTGCTGACAT | 997 | EGRGSLLTCGDVEENPGP | 998 |
| | GTGGCGATGTGGAGGAAAACCCAGG | | | |
| | ACCA | | | |
| Linker | CCATGG | 999 | PW | 1000 |
| Signal | ATGGAGTTTGGACTTTCTTGGTTGTTT | 1001 | MEFGLSWLFLVAILKGVQCSR | 1002 |
| Peptide | TTGGTGGCAATTCTGAAGGGTGTCCA | | | |
| | GTGTAGCAGG | | | |
| PSCA(A11) | GACATCCAACTGACGCAAAGCCCATC | 1003 | DIQLTQSPSTLSASMGDRVTITCSASSS | 1004 |
| VL | TACACTCAGCGCTAGCATGGGGGACA | | VRFIHWYQQKPGKAPKRLIYDTSKLAS | |
| | GGGTCACAATCACGTGCTCTGCCTCA | | GVPSRFSGSGSGTDFTLTISSLQPEDFA | |
| | AGTTCCGTTAGGTTTATCCATTGGTAT | | TYYCQQWGSSPFTFGQGTKVEIK | |
| | CAGCAGAAACCTGGAAAGGCCCCAAA | | | |
| | AAGACTGATCTATGATACCAGCAAGC | | | |
| | TGGCTTCCGGAGTGCCCTCAAGGTTC | | | |
| | TCAGGATCTGGCAGTGGGACCGATTT | | | |
| | CACCCTGACAATTAGCAGCCTTCAGC | | | |
| | CAGAGGATTTCGCAACCTATTACTGT | | | |
| | CAGCAATGGGGGTCCAGCCCATTCAC | | | |
| | TTTCGGCCAAGGAACAAAGGTGGAGA | | | |
| | TAAAA | | | |
| Flex | GGCGGAGGAAGCGGAGGTGGGGGC | 1005 | gggsgggg | 1006 |
| PSCA(A11) | GAGGTGCAGCTCGTGGAGTATGGCG | 1007 | EVQLVEYGGGLVQPGGSLRLSCAASG | 1008 |
| VH | GGGGCCTGGTGCAGCCTGGGGGTAG | | FNIKDYYIHWVRQAPGKGLEWVAWIDP | |
| | TCTGAGGCTCTCCTGCGCTGCCTCTG | | ENGDTEFVPKFQGRATMSADTSKNTAY | |
| | GCTTTAACATTAAAGACTACTACATAC | | LQMNSLRAEDTAVYYCKTGGFWGQGT | |
| | ATTGGGTGCGGCAGGCCCCAGGCAA | | LVTVSS | |
| | AGGGCTCGAATGGGTGGCCTGGATT | | | |
| | GACCCTGAGAATGGTGACACTGAGTT | | | |
| | TGTCCCCAAGTTTCAGGGCAGAGCCA | | | |
| | CCATGAGCGCTGACACAAGCAAAAAC | | | |
| | ACTGCTTATCTCCAAATGAATAGCCTG | | | |
| | CGAGCTGAAGATACAGCAGTCTATTA | | | |
| | CTGCAAGACGGGAGGATTCTGGGGC | | | |
| | CAGGGAACTCTGGTGACAGTTAGTTCC | | | |
| Linker | GGATCC | 1009 | gs | 1010 |
| CD34 | GAACTTCCTACTCAGGGGACTTTCTC | 1011 | ELPTQGTFSNVSTNVS | 1012 |
| epitope | AAACGTTAGCACAAACGTAAGT | | | |
| CD8 stalk | CCCGCCCCAAGACCCCCCACACCTG | 1013 | PAPRPPTPAPTIASQPLSLRPEACRPAA | 1014 |
| | CGCCGACCATTGCTTCTCAACCCCTG | | GGAVHTRGLDFACD | |
| | AGTTTGAGACCCGAGGCCTGCCGGC | | | |
| | CAGCTGCCGGCGGGGCCGTGCATAC | | | |
| | AAGAGGACTCGATTTCGCTTGCGAC | | | |
| CD8 | ATCTATATCTGGGCACCTCTCGCTGG | 1015 | IYIWAPLAGTCGVLLLSLVITLYCNHRNR | 1016 |
| transmembrane | CACCTGTGGAGTCCTTCTGCTCAGCC | | RRVCKCPR | |
| | TGGTTATTACTCTGTACTGTAATCACC | | | |
| | GGAATCGCCGCCGCGTTTGTAAGTGT | | | |
| | CCCAGG | | | |
| Linker | GTCGAC | 1017 | VD | 1018 |
| CD3ζ | AGAGTGAAGTTCAGCAGGAGCGCAG | 1019 | RVKFSRSADAPAYQQGQNQLYNELNL | 1020 |
| | ACGCCCCCGCGTACCAGCAGGGCCA | | GRREEYDVLDKRRGRDPEMGGKPRRK | |
| | GAACCAGCTCTATAACGAGCTCAATC | | NPQEGLYNELQKDKMAEAYSEIGMKGE | |
| | TAGGACGAAGAGAGGAGTACGATGTT | | RRRGKGHDGLYQGLSTATKDTYDALH | |
| | TTGGACAAGAGACGTGGCCGGGACC | | MQALPPR | |
| | CTGAGATGGGGGGAAAGCCGAGAAG | | | |
| | GAAGAACCCTCAGGAAGGCCTGTACA | | | |
| | ATGAACTGCAGAAAGATAAGATGGCG | | | |
| | GAGGCCTACAGTGAGATTGGGATGAA | | | |
| | AGGCGAGCGCCGGAGGGGCAAGGG | | | |
| | GCACGATGGCCTTTACCAGGGTCTCA | | | |
| | GTACAGCCACCAAGGACACCTACGAC | | | |
| | GCCCTTCACATGCAAGCTCTTCCACC | | | |
| | TCGT | | | |
| Linker | gGAACGCGTGGATCGGGA | 1021 | GTRGSG | 1022 |
| P2A | GCTACTAACTTCAGCCTGCTGAAGCA | 1023 | ATNFSLLKQAGDVEENPGP | 1024 |
| | GGCTGGAGACGTGGAGGAGAACcccg | | | |
| | ggcct | | | |
| MyD88 | atggctgcaggaggtcccggcgcggggtctgcggcc | 1025 | MAAGGPGAGSAAPVSSTSSLPLAALN | 1026 |
| | ccggtctcctccacatcctcccttcccctggctgctctca | | MRVRRRLSLFLNVRTQVAADWTALAEE | |
| | acatgcgagtgcggcgccgcctgtctctgttcttgaacg | | MDFEYLEIRQLETQADPTGRLLDAWQG | |
| | tgcggacacaggtggcggccgactggaccgcgctgg | | RPGASVGRLLDLLTKLGRDDVLLELGP | |
| | cggaggagatggactttgagtacttggagatccggca | | SIEEDCQKYILKQQQEEAEKPLQVAAVD | |
| | actggagacacaagcggaccccactggcaggctgct | | SSVPRTAELAGITTLDDPLGHMPERFDA | |
| | ggacgcctggcagggacgccctggcgcctctgtagg | | FICYCPSDI | |
| | ccgactgctcgatctgcttaccaagctgggccgcgacg | | | |
| | acgtgctgctggagctgggacccagcattgaggagg | | | |
| | attgccaaaagtatatcttgaagcagcagcaggagga | | | |
| | ggctgagaagcctttacaggtggccgctgtagacagc | | | |
| | agtgtcccacggacagcagagctggcgggcatcacc | | | |
| | acacttgatgaccccctggggcatatgcctgagcgtttc | | | |
| | gatgccttcatctgctattgccccagcgacatc | | | |
| Linker | gtcgag | 1027 | VE | 1028 |
| CD40 | aaaaaggtggccaagaagccaaccaataaggcccc | 1029 | KKVAKKPTNKAPHPKQEPQEINFPDDL | 1030 |
| | ccaccccaagcaggagccccaggagatcaattttccc | | PGSNTAAPVQETLHGCQPVTQEDGKE | |
| | gacgatcttcctggctccaacactgctgctccagtgcag | | SRISVQERQ | |
| | gagactttacatggatgccaaccggtcacccaggagg | | | |
| | atggcaaagagagtcgcatctcagtgcaggagagac | | | |
| | ag | | | |
| Linker | gtcgag | 1031 | VE | 1032 |
| FKBPᵥ′ | GGcGTcCAaGTcGAaACcATtagtCCcGG | 1033 | GVQVETISPGDGRTFPKRGQTCVVHYT | 1034 |
| | cGAtGGcaGaACaTTtCCtAAaaGgGGaC | | GMLEDGKKVDSSRDRNKPFKFMLGKQ | |
| | AaACaTGtGTcGTcCAtTAtACaGGcATGt | | EVIRGWEEGVAQMSVGQRAKLTISPDY | |
| | TgGAgGAcGGcAAaAAgGTgGAcagtagta | | AYGATGHPGIIPPHATLVFDVELLKLE | |
| | GaGAtcGcAAtAAaCCtTTcAAaTTcATGtT | | | |
| | gGGaAAaCAaGAaGTcATtaGgGGaTGG | | | |
| | GAgGAgGGcGTgGCtCAaATGtccGTcG | | | |
| | GcCAacGcGCtAAgCTcACcATcagcCCc | | | |
| | GAcTAcGCaTAcGGcGCtACcGGaCAtC | | | |
| | CcGGaATtATtCCcCCtCAcGCtACctTgG | | | |
| | TgTTtGAcGTcGAaCTgtTgAAgCTcGAa | | | |
| Linker | gtcgag | 1035 | VE | 1036 |
| FKBPᵥ | ggagtgcaggtggagactatctccccaggagacggg | 1037 | GVQVETISPGDGRTFPKRGQTCVVHYT | 1038 |
| | cgcaccttccccaagcgcggccagacctgcgtggtgc | | GMLEDGKKVDSSRDRNKPFKFMLGKQ | |
| | actacaccgggatgcttgaagatggaaagaaagttga | | EVIRGWEEGVAQMSVGQRAKLTISPDY | |
| | ttcctcccgggacagaaacaagccctttaagtttatgct | | AYGATGHPGIIPPHATLVFDVELLKLE | |
| | aggcaagcaggaggtgatccgaggctgggaagaag | | | |
| | gggttgcccagatgagtgtgggtcagagagccaaact | | | |
| | gactatatctccagattatgcctatggtgccactgggca | | | |
| | cccaggcatcatcccaccacatgccactctcgtcttcg | | | |
| | atgtggagcttctaaaactggaa | | | |
| STOP | TGA | 1039 | stop | |

APPENDIX 3
pBP1310--pSFG.FRB.FKBP.ΔC9.T2A-ΔCD19

| Fragment | Nucleotide | SEQ ID NO: | Peptide | SEQ ID NO: |
|---|---|---|---|---|
| Leader peptide | ATGCtcgag | 1040 | MLE | 1041 |
| FRB | gaaatgTGGCATGAAGGGTT | 1042 | EMWHEGLEEASRLYFGERNVKGMFEV | 1043 |
| | GGAAGAAGCTTCAAGGCTG | | LEPLHAMMERGPQTLKETSFNQAYGR | |
| | TACTTCGGAGAGAGGAACG | | DLMEAQEWCRKYMKSGNVKDLTQAW | |
| | TGAAGGGCATGTTTGAGGT | | DLYYHVFRRISK | |
| | TCTTGAACCTCTGCACGCC | | | |
| | ATGATGGAACGGGGACCG | | | |
| | CAGACACTGAAAGAAACCT | | | |
| | CTTTTAATCAGGCCTACGG | | | |
| | CAGAGACCTGATGGAGGCC | | | |
| | CAAGAATGGTGTAGAAAGT | | | |
| | ATATGAAATCCGGTAACGT | | | |
| | GAAAGACCTGactCAGGCCT | | | |
| | GGGACCTTTATTACCATGT | | | |
| | GTTCAGGCGGATCAGTAAG | | | |
| Linker | TCAGGCGGTGGCTCAGGT | 1044 | SGGGSG | 1045 |
| FKBP wt | GGcGTcCAaGTcGAaACcATt | 1046 | GVQVETISPGDGRTFPKRGQTCVVHYT | 1047 |
| | agtCCcGGcGAtGGcaGaACaT | | GMLEDGKKFDSSRDRNKPFKFMLGKQ | |
| | TtCCtAAaaGgGGaCAaACaT | | EVIRGWEEGVAQMSVGQRAKLTISPDY | |
| | GtGTcGTcCAtTAtACaGGcAT | | AYGATGHPGIIPPHATLVFDVELLKL | |
| | GtTgGAgGAcGGcAAaAAgTT | | | |
| | CGAcagtagtaGaGAtcGcAAtA | | | |
| | AaCCtTTcAAaTTcATGtTgGG | | | |
| | aAAaCAaGAaGTcATtaGgGG | | | |
| | aTGGGAgGAgGGcGTgGCtC | | | |
| | AaATGtccGTcGGcCAacGcG | | | |
| | CtAAgCTcACcATcagcCCcGA | | | |
| | cTAcGCaTAcGGcGCtACcGG | | | |
| | aCAtCCcggaattATtCCcCCtCA | | | |
| | cGCtACctTgGTgTTtGAcGTc | | | |
| | GAaCTgtTgAAgCTc | | | |
| Linker | TCGGGGGGCGGATCAGGA | 1048 | SGGGSVD | 1049 |
| | GTCGAC | | | |
| Δcaspase9 | GGATTTGGTGATGTCGGTG | 1050 | GFGDVGALESLRGNADLAYILSMEPCG | 1051 |
| | CTCTTGAGAGTTTGAGGGG | | HCLIINNVNFCRESGLRTRTGSNIDCEK | |
| | AAATGCAGATTTGGCTTACA | | LRRRFSSLHFMVEVKGDLTAKKMVLAL | |
| | TCCTGAGCATGGAGCCCTG | | LELARQDHGALDCCVVVILSHGCQASH | |
| | TGGCCACTGCCTCATTATC | | LQFPGAVYGTDGCPVSVEKIVNIFNGTS | |
| | AACAATGTGAACTTCTGCC | | CPSLGGKPKLFFIQACGGEQKDHGFEV | |
| | GTGAGTCCGGGCTCCGCA | | ASTSPEDESPGSNPEPDATPFQEGLRT | |
| | CCCGCACTGGCTCCAACAT | | FDQLDAISSLPTPSDIFVSYSTFPGFVS | |
| | CGACTGTGAGAAGTTGCGG | | WRDPKSGSWYVETLDDIFEQWAHSED | |
| | CGTCGCTTCTCCTCGCTGC | | LQSLLLRVANAVSVKGIYKQMPGCFNF | |
| | ATTTCATGGTGGAGGTGAA | | LRKKLFFKTSASRA | |
| | GGGCGACCTGACTGCCAA | | | |
| | GAAAATGGTGCTGGCTTTG | | | |
| | CTGGAGCTGGCGCgGCAG | | | |
| | GACCACGGTGCTCTGGACT | | | |
| | GCTGCGTGGTGGTCATTCT | | | |
| | CTCTCACGGCTGTCAGGCC | | | |
| | AGCCACCTGCAGTTCCCAG | | | |
| | GGGCTGTCTACGGCACAGA | | | |
| | TGGATGCCCTGTGTCGGTC | | | |
| | GAGAAGATTGTGAACATCT | | | |
| | TCAATGGGACCAGCTGCCC | | | |
| | CAGCCTGGGAGGGAAGCC | | | |
| | CAAGCTCTTTTTCATCCAGG | | | |
| | CCTGTGGTGGGGAGCAGA | | | |
| | AAGACCATGGGTTTGAGGT | | | |
| | GGCCTCCACTTCCCCTGAA | | | |
| | GACGAGTCCCCTGGCAGTA | | | |
| | ACCCCGAGCCAGATGCCAC | | | |
| | CCCGTTCCAGGAAGGTTTG | | | |
| | AGGACCTTCGACCAGCTGG | | | |
| | ACGCCATATCTAGTTTGCC | | | |
| | CACACCCAGTGACATCTTT | | | |
| | GTGTCCTACTCTACTTTCCC | | | |
| | AGGTTTTGTTTCCTGGAGG | | | |
| | GACCCCAAGAGTGGCTCCT | | | |
| | GGTACGTTGAGACCCTGGA | | | |
| | CGACATCTTTGAGCAGTGG | | | |
| | GCTCACTCTGAAGACCTGC | | | |
| | AGTCCCTCCTGCTTAGGGT | | | |
| | CGCTAATGCTGTTTCGGTG | | | |
| | AAAGGGATTTATAAACAGAT | | | |
| | GCCTGGTTGCTTTAATTTCC | | | |
| | TCCGGAAAAAACTTTTCTTT | | | |
| | AAAACATCAGCTAGCAGAG | | | |
| | CC | | | |
| Linker | ccgcGG | 1052 | PR | 1053 |
| T2A | GAAGGCCGAGGGAGCCTG | 1054 | EGRGSLLTCGDVEENPGP | 1055 |
| | CTGACATGTGGCGATGTGG | | | |
| | AGGAAAACCCAGGACCA | | | |
| ΔCD19 | ATGCCACCACCTCGCCTGC | 1056 | MPPPRLLFFLLFLTPMEVRPEEPLVVKV | 1057 |
| | TGTTCTTTCTGCTGTTCCTG | | EEGDNAVLQCLKGTSDGPTQQLTWSR | |
| | ACACCTATGGAGGTGCGAC | | ESPLKPFLKLSLGLPGLGIHMRPLAIWL | |
| | CTGAGGAACCACTGGTCGT | | FIFNVSQQMGGFYLCQPGPPSEKAWQ | |
| | GAAGGTCGAGGAAGGCGA | | PGWTVNVEGSGELFRWNVSDLGGLG | |
| | CAATGCCGTGCTGCAGTGC | | CGLKNRSSEGPSSPSGKLMSPKLYVW | |
| | CTGAAAGGCACTTCTGATG | | AKDRPEIWEGEPPCLPPRDSLNQSLSQ | |
| | GGCCAACTCAGCAGCTGAC | | DLTMAPGSTLWLSCGVPPDSVSRGPL | |
| | CTGGTCCAGGGAGTCTCCC | | SWTHVHPKGPKSLLSLELKDDRPARD | |
| | CTGAAGCCTTTTCTGAAACT | | MWVMETGLLLPRATAQDAGKYYCHRG | |
| | GAGCCTGGGACTGCCAGG | | NLTMSFHLEITARPVLWHWLLRTGGWK | |
| | ACTGGGAATCCACATGCGC | | VSAVTLAYLIFCLCSLVGILHLQRALVLR | |
| | CCTCTGGCTATCTGGCTGT | | RKRKRMTDPTRRF | |
| | TCATCTTCAACGTGAGCCA | | | |
| | GCAGATGGGAGGATTCTAC | | | |
| | CTGTGCCAGCCAGGACCAC | | | |
| | CATCCGAGAAGGCCTGGCA | | | |
| | GCCTGGATGGACCGTCAAC | | | |
| | GTGGAGGGGTCTGGAGAA | | | |
| | CTGTTTAGGTGGAATGTGA | | | |
| | GTGACCTGGGAGGACTGG | | | |
| | GATGTGGGCTGAAGAACCG | | | |
| | CTCCTCTGAAGGCCCAAGT | | | |
| | TCACCCTCAGGGAAGCTGA | | | |
| | TGAGCCCAAAACTGTACGT | | | |
| | GTGGGCCAAAGATCGGCC | | | |
| | CGAGATCTGGGAGGGAGA | | | |
| | ACCTCCATGCCTGCCACCT | | | |
| | AGAGACAGCCTGAATCAGA | | | |
| | GTCTGTCACAGGATCTGAC | | | |
| | AATGGCCCCCGGGTCCACT | | | |
| | CTGTGGCTGTCTTGTGGAG | | | |
| | TCCCACCCGACAGCGTGTC | | | |
| | CAGAGGCCCTCTGTCCTGG | | | |
| | ACCCACGTGCATCCTAAGG | | | |
| | GGCCAAAAAGTCTGCTGTC | | | |
| | ACTGGAACTGAAGGACGAT | | | |
| | CGGCCTGCCAGAGACATGT | | | |
| | GGGTCATGGAGACTGGACT | | | |
| | GCTGCTGCCACGAGCAACC | | | |
| | GCACAGGATGCTGGAAAAT | | | |
| | ACTATTGCCACCGGGGCAA | | | |
| | TCTGACAATGTCCTTCCATC | | | |
| | TGGAGATCACTGCAAGGCC | | | |
| | CGTGCTGTGGCACTGGCTG | | | |
| | CTGCGAACCGGAGGATGG | | | |
| | AAGGTCAGTGCTGTGACAC | | | |
| | TGGCATATCTGATCTTTTGC | | | |
| | CTGTGCTCCCTGGTGGGCA | | | |
| | TTCTGCATCTGCAGAGAGC | | | |
| | CCTGGTGCTGCGGAGAAAG | | | |
| | AGAAAGAGAATGACTGACC | | | |
| | CAACAAGAAGGTTT | | | |
| STOP | TGA | 1058 | stop | |

APPENDIX 4
pBP1311--pSFG.FKBP.FRB.ΔC9.T2A-ΔCD19

| | | SEQ ID | | SEQ ID |
|---|---|---|---|---|
| Fragment | Nucleotide | NO: | Peptide | NO: |
| Leader peptide | ATGCtcgag | 1059 | MLE | 1060 |
| FKBP wt | GGcGTcCAaGTcGAaACcATtagtCCc | 1061 | GVQVETISPGDGRTFPKRGQTCVV | 1062 |
| | GGcGAtGGcaGaACaTTtCCtAAaaGg | | HYTGMLEDGKKFDSSRDRNKPFKF | |
| | GGaCAaACaTGtGTcGTcCAtTAtACa | | MLGKQEVIRGWEEGVAQMSVGQR | |
| | GGcATGtTgGAgGAcGGcAAaAAgTT | | AKLTISPDYAYGATGHPGIIPPHATL | |
| | CGAcagtagtaGaGAtcGcAAtAAaCCtT | | VFDVELLKL | |
| | TcAAaTTcATGtTgGGaAAaCAaGAa | | | |
| | GTcATtaGgGGaTGGGAgGAgGGcG | | | |
| | TgGCtCAaATGtccGTcGGcCAacGcG | | | |
| | CtAAgCTcACcATcagcCCcGAcTAcG | | | |
| | CaTAcGGcGCtACcGGaCAtCCcggaa | | | |
| | ttATtCCcCCtCAcGCtACctTgGTgTTt | | | |
| | GAcGTcGAaCTgtTgAAgCTc | | | |
| Linker | TCGGGGGGCGGATCAGG | 1063 | SGGGS | 1064 |
| FRB | gaaatgTGGCATGAAGGGTTGGAAG | 1065 | EMWHEGLEEASRLYFGERNVKGM | 1066 |
| | AAGCTTCAAGGCTGTACTTCGGAG | | FEVLEPLHAMMERGPQTLKETSFN | |
| | AGAGGAACGTGAAGGGCATGTTT | | QAYGRDLMEAQEWCRKYMKSGNV | |
| | GAGGTTCTTGAACCTCTGCACGCC | | KDLTQAWDLYYHVFRRISK | |
| | ATGATGGAACGGGGACCGCAGAC | | | |
| | ACTGAAAGAAACCTCTTTTAATCAG | | | |
| | GCCTACGGCAGAGACCTGATGGA | | | |
| | GGCCCAAGAATGGTGTAGAAAGTA | | | |
| | TATGAAATCCGGTAACGTGAAAGA | | | |
| | CCTGactCAGGCCTGGGACCTTTAT | | | |
| | TACCATGTGTTCAGGCGGATCAGT | | | |
| | AAG | | | |
| Linker | TCAGGCGGTGGCTCAGGTGTCGAC | 1067 | SGGGSGVD | 1068 |
| Δcaspase9 | GGATTTGGTGATGTCGGTGCTCTT | 1069 | GFGDVGALESLRGNADLAYILSMEP | 1070 |
| | GAGAGTTTGAGGGGAAATGCAGAT | | CGHCLIINNVNFCRESGLRTRTGSN | |
| | TTGGCTTACATCCTGAGCATGGAG | | IDCEKLRRRFSSLHFMVEVKGDLTA | |
| | CCCTGTGGCCACTGCCTCATTATC | | KKMVLALLELARQDHGALDCCVVVI | |
| | AACAATGTGAACTTCTGCCGTGAG | | LSHGCQASHLQFPGAVYGTDGCPV | |
| | TCCGGGCTCCGCACCCGCACTGG | | SVEKIVNIFNGTSCPSLGGKPKLFFI | |
| | CTCCAACATCGACTGTGAGAAGTT | | QACGGEQKDHGFEVASTSPEDES | |
| | GCGGCGTCGCTTCTCCTCGCTGC | | PGSNPEPDATPFQEGLRTFDQLDAI | |
| | ATTTCATGGTGGAGGTGAAGGGC | | SSLPTPSDIFVSYSTFPGFVSWRDP | |
| | GACCTGACTGCCAAGAAAATGGTG | | KSGSWYVETLDDIFEQWAHSEDLQ | |
| | CTGGCTTTGCTGGAGCTGGCGCg | | SLLLRVANAVSVKGIYKQMPGCFNF | |
| | GCAGGACCACGGTGCTCTGGACT | | LRKKLFFKTSASRA | |
| | GCTGCGTGGTGGTCATTCTCTCTC | | | |
| | ACGGCTGTCAGGCCAGCCACCTG | | | |
| | CAGTTCCCAGGGGCTGTCTACGG | | | |
| | CACAGATGGATGCCCTGTGTCGGT | | | |
| | CGAGAAGATTGTGAACATCTTCAA | | | |
| | TGGGACCAGCTGCCCCAGCCTGG | | | |
| | GAGGGAAGCCCAAGCTCTTTTTCA | | | |
| | TCCAGGCCTGTGGTGGGGAGCAG | | | |
| | AAAGACCATGGGTTTGAGGTGGC | | | |
| | CTCCACTTCCCCTGAAGACGAGTC | | | |
| | CCCTGGCAGTAACCCCGAGCCAG | | | |
| | ATGCCACCCCGTTCCAGGAAGGTT | | | |
| | TGAGGACCTTCGACCAGCTGGAC | | | |
| | GCCATATCTAGTTTGCCCACACCC | | | |
| | AGTGACATCTTTGTGTCCTACTCTA | | | |
| | CTTTCCCAGGTTTTGTTTCCTGGA | | | |
| | GGGACCCCAAGAGTGGCTCCTGG | | | |
| | TACGTTGAGACCCTGGACGACATC | | | |
| | TTTGAGCAGTGGGCTCACTCTGAA | | | |
| | GACCTGCAGTCCCTCCTGCTTAGG | | | |
| | GTCGCTAATGCTGTTTCGGTGAAA | | | |
| | GGGATTTATAAACAGATGCCTGGT | | | |
| | TGCTTTAATTTCCTCCGGAAAAAAC | | | |
| | TTTTCTTTAAAACATCAGCTAGCAG | | | |
| | AGCC | | | |
| Linker | ccgcGG | 1071 | PR | 1072 |
| T2A | GAAGGCCGAGGGAGCCTGCTGAC | 1073 | EGRGSLLTCGDVEENPGP | 1074 |
| | ATGTGGCGATGTGGAGGAAAACC | | | |
| | CAGGACCA | | | |
| ΔCD19 | ATGCCACCACCTCGCCTGCTGTTC | 1075 | MPPPRLLFFLLFLTPMEVRPEEPLV | 1076 |
| | TTTCTGCTGTTCCTGACACCTATG | | VKVEEGDNAVLQCLKGTSDGPTQQ | |
| | GAGGTGCGACCTGAGGAACCACT | | LTWSRESPLKPFLKLSLGLPGLGIH | |
| | GGTCGTGAAGGTCGAGGAAGGCG | | MRPLAIWLFIFNVSQQMGGFYLCQ | |
| | ACAATGCCGTGCTGCAGTGCCTGA | | PGPPSEKAWQPGWTVNVEGSGEL | |
| | AAGGCACTTCTGATGGGCCAACTC | | FRWNVSDLGGLGCGLKNRSSEGP | |
| | AGCAGCTGACCTGGTCCAGGGAG | | SSPSGKLMSPKLYVWAKDRPEIWE | |
| | TCTCCCCTGAAGCCTTTTCTGAAA | | GEPPCLPPRDSLNQSLSQDLTMAP | |
| | CTGAGCCTGGGACTGCCAGGACT | | GSTLWLSCGVPPDSVSRGPLSWT | |
| | GGGAATCCACATGCGCCCTCTGG | | HVHPKGPKSLLSLELKDDRPARDM | |
| | CTATCTGGCTGTTCATCTTCAACG | | WVMETGLLLPRATAQDAGKYYCHR | |
| | TGAGCCAGCAGATGGGAGGATTC | | GNLTMSFHLEITARPVLWHWLLRT | |
| | TACCTGTGCCAGCCAGGACCACC | | GGWKVSAVTLAYLIFCLCSLVGILHL | |
| | ATCCGAGAAGGCCTGGCAGCCTG | | QRALVLRRKRKRMTDPTRRF | |
| | GATGGACCGTCAACGTGGAGGGG | | | |
| | TCTGGAGAACTGTTTAGGTGGAAT | | | |
| | GTGAGTGACCTGGGAGGACTGGG | | | |
| | ATGTGGGCTGAAGAACCGCTCCTC | | | |
| | TGAAGGCCCAAGTTCACCCTCAGG | | | |
| | GAAGCTGATGAGCCCAAAACTGTA | | | |
| | CGTGTGGGCCAAAGATCGGCCCG | | | |
| | AGATCTGGGAGGGAGAACCTCCA | | | |
| | TGCCTGCCACCTAGAGACAGCCT | | | |
| | GAATCAGAGTCTGTCACAGGATCT | | | |
| | GACAATGGCCCCCGGGTCCACTC | | | |
| | TGTGGCTGTCTTGTGGAGTCCCAC | | | |
| | CCGACAGCGTGTCCAGAGGCCCT | | | |
| | CTGTCCTGGACCCACGTGCATCCT | | | |
| | AAGGGGCCAAAAAGTCTGCTGTCA | | | |
| | CTGGAACTGAAGGACGATCGGCC | | | |
| | TGCCAGAGACATGTGGGTCATGG | | | |
| | AGACTGGACTGCTGCTGCCACGA | | | |
| | GCAACCGCACAGGATGCTGGAAA | | | |
| | ATACTATTGCCACCGGGGCAATCT | | | |
| | GACAATGTCCTTCCATCTGGAGAT | | | |
| | CACTGCAAGGCCCGTGCTGTGGC | | | |
| | ACTGGCTGCTGCGAACCGGAGGA | | | |
| | TGGAAGGTCAGTGCTGTGACACTG | | | |
| | GCATATCTGATCTTTTGCCTGTGC | | | |
| | TCCCTGGTGGGCATTCTGCATCTG | | | |
| | CAGAGAGCCCTGGTGCTGCGGAG | | | |
| | AAAGAGAAAGAGAATGACTGACCC | | | |
| | AACAAGAAGGTTT | | | |
| STOP | TGA | 1077 | stop | |

APPENDIX 5
pBP1316--pSFG-FKBP.FRB_{L}.ΔC9.T2A-αPSCA.Q.CD8stm.ζ.P2A-iMC

| Fragment | Nucleotide | SEQ ID NO: | Peptide | SEQ ID NO: |
|---|---|---|---|---|
| Leader peptide | ATGCtcgagcaattg | 1078 | MLEQL | 1079 |
| FKBP″ wt | GGcGTGCAaGTGGAaACTAT | 1080 | GVQVETISPGDGRTFPKRGQTC | 1081 |
| | aAGCCCgGGAGAcGGCcGcA | | VVHYTGMLEDGKKFDSSRDRN | |
| | CATTtCCCAAgAGAGGcCAG | | KPFKFMLGKQEVIRGWEEGVA | |
| | ACcTGCGTgGTGCAcTATACa | | QMSVGQRAKLTISPDYAYGATG | |
| | GGAATGCTGGAgGACGGgA | | HPGIIPPHATLVFDVELLKLE | |
| | AGAAaTTCGAtAGCtcCCGGG | | | |
| | AtCGAAAtAAGCCtTTCAAaTT | | | |
| | CATGCTGGGcAAGCAaGAA | | | |
| | GTcATCaGaGGCTGGGAaGA | | | |
| | AGGcGTCGCcCAGATGTCcG | | | |
| | TGGGtCAGcGcGCCAAgCTG | | | |
| | ACaATTAGtCCAGAtTACGCc | | | |
| | TATGGcGCAACaGGCCAtCC | | | |
| | CGGcATCATcCCCCCaCATG | | | |
| | CcACACTcGTCTTtGATGTcG | | | |
| | AGCTcCTGAAaCTGGAg | | | |
| Linker | GGCGGGcaattg | 1082 | ggql | 1083 |
| FRB_{L} | gaaatgTGGCATGAAGGGTTG | 1084 | EMWHEGLEEASRLYFGERNVK | 1085 |
| | GAAGAAGCTTCAAGGCTGT | | GMFEVLEPLHAMMERGPQTLK | |
| | ACTTCGGAGAGAGGAACGT | | ETSFNQAYGRDLMEAQEWCRK | |
| | GAAGGGCATGTTTGAGGTT | | YMKSGNVKDLLQAWDLYYHVF | |
| | CTTGAACCTCTGCACGCCAT | | RRISK | |
| | GATGGAACGGGGACCGCAG | | | |
| | ACACTGAAAGAAACCTCTTT | | | |
| | TAATCAGGCCTACGGCAGA | | | |
| | GACCTGATGGAGGCCCAAG | | | |
| | AATGGTGTAGAAAGTATATG | | | |
| | AAATCCGGTAACGTGAAAG | | | |
| | ACCTGcttCAGGCCTGGGAC | | | |
| | CTTTATTACCATGTGTTCAG | | | |
| | GCGGATCAGTAAG | | | |
| Linker | TCAGGCGGTGGCTCAGGTc | 1086 | SGGGSGPW | 1087 |
| | catgg | | | |
| Δcaspase9 | GGATTTGGTGATGTCGGTG | 1088 | GFGDVGALESLRGNADLAYILS | 1089 |
| | CTCTTGAGAGTTTGAGGGG | | MEPCGHCLIINNVNFCRESGLR | |
| | AAATGCAGATTTGGCTTACA | | TRTGSNIDCEKLRRRFSSLHFM | |
| | TCCTGAGCATGGAGCCCTG | | VEVKGDLTAKKMVLALLELARQ | |
| | TGGCCACTGCCTCATTATCA | | DHGALDCCVVVILSHGCQASHL | |
| | ACAATGTGAACTTCTGCCGT | | QFPGAVYGTDGCPVSVEKIVNI | |
| | GAGTCCGGGCTCCGCACCC | | FNGTSCPSLGGKPKLFFIQACG | |
| | GCACTGGCTCCAACATCGA | | GEQKDHGFEVASTSPEDESPG | |
| | CTGTGAGAAGTTGCGGCGT | | SNPEPDATPFQEGLRTFDQLDA | |
| | CGCTTCTCCTCGCTGCATTT | | ISSLPTPSDIFVSYSTFPGFVSW | |
| | CATGGTGGAGGTGAAGGGC | | RDPKSGSWYVETLDDIFEQWA | |
| | GACCTGACTGCCAAGAAAA | | HSEDLQSLLLRVANAVSVKGIYK | |
| | TGGTGCTGGCTTTGCTGGA | | QMPGCFNFLRKKLFFKTSASRA | |
| | GCTGGCGCgGCAGGACCAC | | | |
| | GGTGCTCTGGACTGCTGCG | | | |
| | TGGTGGTCATTCTCTCTCAC | | | |
| | GGCTGTCAGGCCAGCCACC | | | |
| | TGCAGTTCCCAGGGGCTGT | | | |
| | CTACGGCACAGATGGATGC | | | |
| | CCTGTGTCGGTCGAGAAGA | | | |
| | TTGTGAACATCTTCAATGGG | | | |
| | ACCAGCTGCCCCAGCCTGG | | | |
| | GAGGGAAGCCCAAGCTCTT | | | |
| | TTTCATCCAGGCCTGTGGT | | | |
| | GGGGAGCAGAAAGAtCATG | | | |
| | GGTTTGAGGTGGCCTCCAC | | | |
| | TTCCCCTGAAGACGAGTCC | | | |
| | CCTGGCAGTAACCCCGAGC | | | |
| | CAGATGCCACCCCGTTCCA | | | |
| | GGAAGGTTTGAGGACCTTC | | | |
| | GACCAGCTGGACGCCATAT | | | |
| | CTAGTTTGCCCACACCCAGT | | | |
| | GACATCTTTGTGTCCTACTC | | | |
| | TACTTTCCCAGGTTTTGTTT | | | |
| | CCTGGAGGGACCCCAAGAG | | | |
| | TGGCTCCTGGTACGTTGAG | | | |
| | ACCCTGGACGACATCTTTGA | | | |
| | GCAGTGGGCTCACTCTGAA | | | |
| | GACCTGCAGTCCCTCCTGC | | | |
| | TTAGGGTCGCTAATGCTGTT | | | |
| | TCGGTGAAAGGGATTTATAA | | | |
| | ACAGATGCCTGGTTGCTTTA | | | |
| | ATTTCCTCCGGAAAAAACTT | | | |
| | TTCTTTAAAACATCAGCTAG | | | |
| | CAGAGCC | | | |
| Linker | ggatctggaccgcGG | 1090 | GSGPR | 1091 |
| T2A | GAAGGCCGAGGGAGCCTG | 1092 | EGRGSLLTCGDVEENPGP | 1093 |
| | CTGACATGTGGCGATGTGG | | | |
| | AGGAAAACCCAGGACCA | | | |
| Linker | CCATGG | 1094 | PW | 1095 |
| Signal Peptide | ATGGAGTTTGGACTTTCTTG | 1096 | MEFGLSWLFLVAILKGVQCSR | 1097 |
| | GTTGTTTTTGGTGGCAATTC | | | |
| | TGAAGGGTGTCCAGTGTAG | | | |
| | CAGG | | | |
| PSCA(A11) VL | GACATCCAACTGACGCAAA | 1098 | DIQLTQSPSTLSASMGDRVTITC | 1099 |
| | GCCCATCTACACTCAGCGC | | SASSSVRFIHWYQQKPGKAPK | |
| | TAGCATGGGGGACAGGGTC | | RLIYDTSKLASGVPSRFSGSGS | |
| | ACAATCACGTGCTCTGCCTC | | GTDFTLTISSLQPEDFATYYCQ | |
| | AAGTTCCGTTAGGTTTATCC | | QWGSSPFTFGQGTKVEIK | |
| | ATTGGTATCAGCAGAAACCT | | | |
| | GGAAAGGCCCCAAAAAGAC | | | |
| | TGATCTATGATACCAGCAAG | | | |
| | CTGGCTTCCGGAGTGCCCT | | | |
| | CAAGGTTCTCAGGATCTGG | | | |
| | CAGTGGGACCGATTTCACC | | | |
| | CTGACAATTAGCAGCCTTCA | | | |
| | GCCAGAGGATTTCGCAACC | | | |
| | TATTACTGTCAGCAATGGGG | | | |
| | GTCCAGCCCATTCACTTTCG | | | |
| | GCCAAGGAACAAAGGTGGA | | | |
| | GATAAAA | | | |
| Flex | GGCGGAGGAAGCGGAGGT | 1100 | gggsgggg | 1101 |
| | GGGGGC | | | |
| PSCA(A11) VH | GAGGTGCAGCTCGTGGAGT | 1102 | EVQLVEYGGGLVQPGGSLRLS | 1103 |
| | ATGGCGGGGGCCTGGTGCA | | CAASGFNIKDYYIHWVRQAPGK | |
| | GCCTGGGGGTAGTCTGAGG | | GLEWVAWIDPENGDTEFVPKF | |
| | CTCTCCTGCGCTGCCTCTG | | QGRATMSADTSKNTAYLQMNS | |
| | GCTTTAACATTAAAGACTAC | | LRAEDTAVYYCKTGGFWGQGT | |
| | TACATACATTGGGTGCGGC | | LVTVSS | |
| | AGGCCCCAGGCAAAGGGCT | | | |
| | CGAATGGGTGGCCTGGATT | | | |
| | GACCCTGAGAATGGTGACA | | | |
| | CTGAGTTTGTCCCCAAGTTT | | | |
| | CAGGGCAGAGCCACCATGA | | | |
| | GCGCTGACACAAGCAAAAA | | | |
| | CACTGCTTATCTCCAAATGA | | | |
| | ATAGCCTGCGAGCTGAAGA | | | |
| | TACAGCAGTCTATTACTGCA | | | |
| | AGACGGGAGGATTCTGGGG | | | |
| | CCAGGGAACTCTGGTGACA | | | |
| | GTTAGTTCC | | | |
| Linker | GGATCC | 1104 | gs | 1105 |
| CD34 epitope | GAACTTCCTACTCAGGGGA | 1106 | ELPTQGTFSNVSTNVS | 1107 |
| | CTTTCTCAAACGTTAGCACA | | | |
| | AACGTAAGT | | | |
| CD8 stalk | CCCGCCCCAAGACCCCCCA | 1108 | PAPRPPTPAPTIASQPLSLRPEA | 1109 |
| | CACCTGCGCCGACCATTGC | | CRPAAGGAVHTRGLDFACD | |
| | TTCTCAACCCCTGAGTTTGA | | | |
| | GACCCGAGGCCTGCCGGC | | | |
| | CAGCTGCCGGCGGGGCCG | | | |
| | TGCATACAAGAGGACTCGA | | | |
| | TTTCGCTTGCGAC | | | |
| CD8 | ATCTATATCTGGGCACCTCT | 1110 | IYIWAPLAGTCGVLLLSLVITLYC | 1111 |
| transmembrane | CGCTGGCACCTGTGGAGTC | | NHRNRRRVCKCPR | |
| | CTTCTGCTCAGCCTGGTTAT | | | |
| | TACTCTGTACTGTAATCACC | | | |
| | GGAATCGCCGCCGCGTTTG | | | |
| | TAAGTGTCCCAGG | | | |
| Linker | GTCGAC | 1112 | VD | 1113 |
| CD3ζ | AGAGTGAAGTTCAGCAGGA | 1114 | RVKFSRSADAPAYQQGQNQLY | 1115 |
| | GCGCAGACGCCCCCGCGTA | | NELNLGRREEYDVLDKRRGRD | |
| | CCAGCAGGGCCAGAACCAG | | PEMGGKPRRKNPQEGLYNELQ | |
| | CTCTATAACGAGCTCAATCT | | KDKMAEAYSEIGMKGERRRGK | |
| | AGGACGAAGAGAGGAGTAC | | GHDGLYQGLSTATKDTYDALH | |
| | GATGTTTTGGACAAGAGAC | | MQALPPR | |
| | GTGGCCGGGACCCTGAGAT | | | |
| | GGGGGGAAAGCCGAGAAG | | | |
| | GAAGAACCCTCAGGAAGGC | | | |
| | CTGTACAATGAACTGCAGAA | | | |
| | AGATAAGATGGCGGAGGCC | | | |
| | TACAGTGAGATTGGGATGA | | | |
| | AAGGCGAGCGCCGGAGGG | | | |
| | GCAAGGGGCACGATGGCCT | | | |
| | TTACCAGGGTCTCAGTACA | | | |
| | GCCACCAAGGACACCTACG | | | |
| | ACGCCCTTCACATGCAAGC | | | |
| | TCTTCCACCTCGT | | | |
| Linker | gGAACGCGTGGATCGGGA | 1116 | GTRGSG | 1117 |
| P2A | GCTACTAACTTCAGCCTGCT | 1118 | ATNFSLLKQAGDVEENPGP | 1119 |
| | GAAGCAGGCTGGAGACGTG | | | |
| | GAGGAGAACcccgggcct | | | |
| MyD88 | atggctgcaggaggtcccggcgcgggg | 1120 | MAAGGPGAGSAAPVSSTSSLP | 1121 |
| | tctgcggccccggtctcctccacatcctc | | LAALNMRVRRRLSLFLNVRTQV | |
| | ccttcccctggctgctctcaacatgcgagt | | AADWTALAEEMDFEYLEIRQLE | |
| | gcggcgccgcctgtctctgttcttgaacgt | | TQADPTGRLLDAWQGRPGASV | |
| | gcggacacaggtggcggccgactgga | | GRLLDLLTKLGRDDVLLELGPSI | |
| | ccgcgctggcggaggagatggactttg | | EEDCQKYILKQQQEEAEKPLQV | |
| | agtacttggagatccggcaactggaga | | AAVDSSVPRTAELAGITTLDDPL | |
| | cacaagcggaccccactggcaggctg | | GHMPERFDAFICYCPSDI | |
| | ctggacgcctggcagggacgccctggc | | | |
| | gcctctgtaggccgactgctcgatctgctt | | | |
| | accaagctgggccgcgacgacgtgctg | | | |
| | ctggagctgggacccagcattgaggag | | | |
| | gattgccaaaagtatatcttgaagcagc | | | |
| | agcaggaggaggctgagaagcctttac | | | |
| | aggtggccgctgtagacagcagtgtccc | | | |
| | acggacagcagagctggcgggcatca | | | |
| | ccacacttgatgaccccctggggcatat | | | |
| | gcctgagcgtttcgatgccttcatctgctat | | | |
| | tgccccagcgacatc | | | |
| Linker | gtcgag | 1122 | VE | 1123 |
| CD40 | aaaaaggtggccaagaagccaacca | 1124 | KKVAKKPTNKAPHPKQEPQEIN | 1125 |
| | ataaggccccccaccccaagcaggag | | FPDDLPGSNTAAPVQETLHGC | |
| | ccccaggagatcaattttcccgacgatct | | QPVTQEDGKESRISVQERQ | |
| | tcctggctccaacactgctgctccagtgc | | | |
| | aggagactttacatggatgccaaccggt | | | |
| | cacccaggaggatggcaaagagagtc | | | |
| | gcatctcagtgcaggagagacag | | | |
| Linker | gtcgag | 1126 | VE | 1127 |
| FKBPᵥ′ | GGcGTcCAaGTcGAaACcATta | 1128 | GVQVETISPGDGRTFPKRGQTC | 1129 |
| | gtCCcGGcGAtGGcaGaACaTT | | VVHYTGMLEDGKKVDSSRDRN | |
| | tCCtAAaaGgGGaCAaACaTGt | | KPFKFMLGKQEVIRGWEEGVA | |
| | GTcGTcCAtTAtACaGGcATGt | | QMSVGQRAKLTISPDYAYGATG | |
| | TgGAgGAcGGcAAaAAgGTgG | | HPGIIPPHATLVFDVELLKLE | |
| | AcagtagtaGaGAtcGcAAtAAaC | | | |
| | CtTTcAAaTTcATGtTgGGaAAa | | | |
| | CAaGAaGTcATtaGgGGaTGG | | | |
| | GAgGAgGGcGTgGCtCAaATG | | | |
| | tccGTcGGcCAacGcGCtAAgC | | | |
| | TcACcATcagcCCcGAcTAcGC | | | |
| | aTAcGGcGCtACcGGaCAtCCc | | | |
| | GGaATtATtCCcCCtCAcGCtA | | | |
| | CctTgGTgTTtGAcGTcGAaCTg | | | |
| | tTgAAgCTcGAa | | | |
| Linker | gtcgag | 1130 | VE | 1131 |
| FKBPᵥ | ggagtgcaggtggagactatctccccag | 1132 | GVQVETISPGDGRTFPKRGQTC | 1133 |
| | gagacgggcgcaccttccccaagcgc | | VVHYTGMLEDGKKVDSSRDRN | |
| | ggccagacctgcgtggtgcactacacc | | KPFKFMLGKQEVIRGWEEGVA | |
| | gggatgcttgaagatggaaagaaagtt | | QMSVGQRAKLTISPDYAYGATG | |
| | gattcctcccgggacagaaacaagccc | | HPGIIPPHATLVFDVELLKLE | |
| | tttaagtttatgctaggcaagcaggaggt | | | |
| | gatccgaggctgggaagaaggggttgc | | | |
| | ccagatgagtgtgggtcagagagccaa | | | |
| | actgactatatctccagattatgcctatggt | | | |
| | gccactgggcacccaggcatcatccca | | | |
| | ccacatgccactctcgtcttcgatgtgga | | | |
| | gcttctaaaactggaa | | | |
| STOP | TGA | 1134 | stop | |

APPENDIX 6
pBP1317--pSFG-FKBP.FRB.ΔC9_{Q}.T2A-αPSCA.Q.CD8stm.ζ.P2A-iMC

| Fragment | Nucleotide | SEQ ID NO: | Peptide | SEQ ID NO: |
|---|---|---|---|---|
| Leader | ATGCtcgagcaattg | 1135 | MLEQL | 1136 |
| peptide | | | | |
| FKBP″ wt | GGcGTGCAaGTGGAaACTATaA | 1137 | GVQVETISPGDGRTFPKRGQTC | 1138 |
| | GCCCgGGAGAcGGCcGcACAT | | VVHYTGMLEDGKKFDSSRDRN | |
| | TtCCCAAgAGAGGcCAGACcTG | | KPFKFMLGKQEVIRGWEEGVA | |
| | CGTgGTGCAcTATACaGGAATG | | QMSVGQRAKLTISPDYAYGATG | |
| | CTGGAgGACGGgAAGAAaTTC | | HPGIIPPHATLVFDVELLKLE | |
| | GAtAGCtcCCGGGAtCGAAAtAA | | | |
| | GCCtTTCAAaTTCATGCTGGGc | | | |
| | AAGCAaGAAGTcATCaGaGGCT | | | |
| | GGGAaGAAGGcGTCGCcCAGA | | | |
| | TGTCcGTGGGtCAGcGcGCCAA | | | |
| | gCTGACaATTAGtCCAGAtTACG | | | |
| | CcTATGGcGCAACaGGCCAtCC | | | |
| | CGGcATCATcCCCCCaCATGCc | | | |
| | ACACTcGTCTTtGATGTcGAGC | | | |
| | TcCTGAAaCTGGAg | | | |
| Linker | GGCGGGcaattg | 1139 | ggql | 1140 |
| FRB | gaaatgTGGCATGAAGGGTTGG | 1141 | EMWHEGLEEASRLYFGERNVK | 1142 |
| | AAGAAGCTTCAAGGCTGTACT | | GMFEVLEPLHAMMERGPQTLK | |
| | TCGGAGAGAGGAACGTGAAG | | ETSFNQAYGRDLMEAQEWCRK | |
| | GGCATGTTTGAGGTTCTTGAA | | YMKSGNVKDLTQAWDLYYHVF | |
| | CCTCTGCACGCCATGATGGAA | | RRISK | |
| | CGGGGACCGCAGACACTGAA | | | |
| | AGAAACCTCTTTTAATCAGGC | | | |
| | CTACGGCAGAGACCTGATGGA | | | |
| | GGCCCAAGAATGGTGTAGAAA | | | |
| | GTATATGAAATCCGGTAACGT | | | |
| | GAAAGACCTGactCAGGCCTGG | | | |
| | GACCTTTATTACCATGTGTTCA | | | |
| | GGCGGATCAGTAAG | | | |
| Linker | TCAGGCGGTGGCTCAGGTccat | 1143 | SGGGSGPW | 1144 |
| | gg | | | |
| Δcaspase-9_{Q} | GGATTTGGTGATGTCGGTGCT | 1145 | GFGDVGALESLRGNADLAYILS | 1146 |
| (N405Q) | CTTGAGAGTTTGAGGGGAAAT | | MEPCGHCLIINNVNFCRESGLR | |
| | GCAGATTTGGCTTACATCCTG | | TRTGSNIDCEKLRRRFSSLHFM | |
| | AGCATGGAGCCCTGTGGCCA | | VEVKGDLTAKKMVLALLELARQ | |
| | CTGCCTCATTATCAACAATGTG | | DHGALDCCVVVILSHGCQASHL | |
| | AACTTCTGCCGTGAGTCCGGG | | QFPGAVYGTDGCPVSVEKIVNI | |
| | CTCCGCACCCGCACTGGCTCC | | FNGTSCPSLGGKPKLFFIQACG | |
| | AACATCGACTGTGAGAAGTTG | | GEQKDHGFEVASTSPEDESPG | |
| | CGGCGTCGCTTCTCCTCGCTG | | SNPEPDATPFQEGLRTFDQLDA | |
| | CATTTCATGGTGGAGGTGAAG | | ISSLPTPSDIFVSYSTFPGFVSW | |
| | GGCGACCTGACTGCCAAGAAA | | RDPKSGSWYVETLDDIFEQWA | |
| | ATGGTGCTGGCTTTGCTGGAG | | HSEDLQSLLLRVANAVSVKGIYK | |
| | CTGGCGCgGCAGGACCACGG | | QMPGCFQFLRKKLFFKTSASRA | |
| | TGCTCTGGACTGCTGCGTGGT | | | |
| | GGTCATTCTCTCTCACGGCTG | | | |
| | TCAGGCCAGCCACCTGCAGTT | | | |
| | CCCAGGGGCTGTCTACGGCA | | | |
| | CAGATGGATGCCCTGTGTCGG | | | |
| | TCGAGAAGATTGTGAACATCT | | | |
| | TCAATGGGACCAGCTGCCCCA | | | |
| | GCCTGGGAGGGAAGCCCAAG | | | |
| | CTCTTTTTCATCCAGGCCTGT | | | |
| | GGTGGGGAGCAGAAAGAtCAT | | | |
| | GGGTTTGAGGTGGCCTCCACT | | | |
| | TCCCCTGAAGACGAGTCCCCT | | | |
| | GGCAGTAACCCCGAGCCAGAT | | | |
| | GCCACCCCGTTCCAGGAAGGT | | | |
| | TTGAGGACCTTCGACCAGCTG | | | |
| | GACGCCATATCTAGTTTGCCC | | | |
| | ACACCCAGTGACATCTTTGTG | | | |
| | TCCTACTCTACTTTCCCAGGTT | | | |
| | TTGTTTCCTGGAGGGACCCCA | | | |
| | AGAGTGGCTCCTGGTACGTTG | | | |
| | AGACCCTGGACGACATCTTTG | | | |
| | AGCAGTGGGCTCACTCTGAAG | | | |
| | ACCTGCAGTCCCTCCTGCTTA | | | |
| | GGGTCGCTAATGCTGTTTCGG | | | |
| | TGAAAGGGATTTATAAACAGAT | | | |
| | GCCTGGTTGCTTTcAaTTCCTC | | | |
| | CGGAAAAAACTTTTCTTTAAAA | | | |
| | CATCAGCTAGCAGAGCC | | | |
| Linker | ggatctggaccgcGG | 1147 | GSGPR | 1148 |
| T2A | GAAGGCCGAGGGAGCCTGCT | 1149 | EGRGSLLTCGDVEENPGP | 1150 |
| | GACATGTGGCGATGTGGAGG | | | |
| | AAAACCCAGGACCA | | | |
| Linker | CCATGG | 1151 | PW | 1152 |
| Signal Peptide | ATGGAGTTTGGACTTTCTTGG | 1153 | MEFGLSWLFLVAILKGVQCSR | 1154 |
| | TTGTTTTTGGTGGCAATTCTGA | | | |
| | AGGGTGTCCAGTGTAGCAGG | | | |
| PSCA(A11) VL | GACATCCAACTGACGCAAAGC | 1155 | DIQLTQSPSTLSASMGDRVTITC | 1156 |
| | CCATCTACACTCAGCGCTAGC | | SASSSVRFIHWYQQKPGKAPK | |
| | ATGGGGGACAGGGTCACAATC | | RLIYDTSKLASGVPSRFSGSGS | |
| | ACGTGCTCTGCCTCAAGTTCC | | GTDFTLTISSLQPEDFATYYCQ | |
| | GTTAGGTTTATCCATTGGTATC | | QWGSSPFTFGQGTKVEIK | |
| | AGCAGAAACCTGGAAAGGCCC | | | |
| | CAAAAAGACTGATCTATGATAC | | | |
| | CAGCAAGCTGGCTTCCGGAGT | | | |
| | GCCCTCAAGGTTCTCAGGATC | | | |
| | TGGCAGTGGGACCGATTTCAC | | | |
| | CCTGACAATTAGCAGCCTTCA | | | |
| | GCCAGAGGATTTCGCAACCTA | | | |
| | TTACTGTCAGCAATGGGGGTC | | | |
| | CAGCCCATTCACTTTCGGCCA | | | |
| | AGGAACAAAGGTGGAGATAAAA | | | |
| Flex | GGCGGAGGAAGCGGAGGTGG | 1157 | gggsgggg | 1158 |
| | GGGC | | | |
| PSCA(A11) VH | GAGGTGCAGCTCGTGGAGTAT | 1159 | EVQLVEYGGGLVQPGGSLRLS | 1160 |
| | GGCGGGGGCCTGGTGCAGCC | | CAASGFNIKDYYIHWVRQAPGK | |
| | TGGGGGTAGTCTGAGGCTCTC | | GLEWVAWIDPENGDTEFVPKF | |
| | CTGCGCTGCCTCTGGCTTTAA | | QGRATMSADTSKNTAYLQMNS | |
| | CATTAAAGACTACTACATACAT | | LRAEDTAVYYCKTGGFWGQGT | |
| | TGGGTGCGGCAGGCCCCAGG | | LVTVSS | |
| | CAAAGGGCTCGAATGGGTGG | | | |
| | CCTGGATTGACCCTGAGAATG | | | |
| | GTGACACTGAGTTTGTCCCCA | | | |
| | AGTTTCAGGGCAGAGCCACCA | | | |
| | TGAGCGCTGACACAAGCAAAA | | | |
| | ACACTGCTTATCTCCAAATGAA | | | |
| | TAGCCTGCGAGCTGAAGATAC | | | |
| | AGCAGTCTATTACTGCAAGAC | | | |
| | GGGAGGATTCTGGGGCCAGG | | | |
| | GAACTCTGGTGACAGTTAGTT | | | |
| | CC | | | |
| Linker | GGATCC | 1161 | gs | 1162 |
| CD34 epitope | GAACTTCCTACTCAGGGGACT | 1163 | ELPTQGTFSNVSTNVS | 1164 |
| | TTCTCAAACGTTAGCACAAAC | | | |
| | GTAAGT | | | |
| CD8 stalk | CCCGCCCCAAGACCCCCCAC | 1165 | PAPRPPTPAPTIASQPLSLRPEA | 1166 |
| | ACCTGCGCCGACCATTGCTTC | | CRPAAGGAVHTRGLDFACD | |
| | TCAACCCCTGAGTTTGAGACC | | | |
| | CGAGGCCTGCCGGCCAGCTG | | | |
| | CCGGCGGGGCCGTGCATACA | | | |
| | AGAGGACTCGATTTCGCTTGC | | | |
| | GAC | | | |
| CD8 | ATCTATATCTGGGCACCTCTC | 1167 | IYIWAPLAGTCGVLLLSLVITLYC | 1168 |
| transmembrane | GCTGGCACCTGTGGAGTCCTT | | NHRNRRRVCKCPR | |
| | CTGCTCAGCCTGGTTATTACT | | | |
| | CTGTACTGTAATCACCGGAAT | | | |
| | CGCCGCCGCGTTTGTAAGTGT | | | |
| | CCCAGG | | | |
| Linker | GTCGAC | 1169 | VD | 1170 |
| CD3ζ | AGAGTGAAGTTCAGCAGGAGC | 1171 | RVKFSRSADAPAYQQGQNQLY | 1172 |
| | GCAGACGCCCCCGCGTACCA | | NELNLGRREEYDVLDKRRGRD | |
| | GCAGGGCCAGAACCAGCTCTA | | PEMGGKPRRKNPQEGLYNELQ | |
| | TAACGAGCTCAATCTAGGACG | | KDKMAEAYSEIGMKGERRRGK | |
| | AAGAGAGGAGTACGATGTTTT | | GHDGLYQGLSTATKDTYDALH | |
| | GGACAAGAGACGTGGCCGGG | | MQALPPR | |
| | ACCCTGAGATGGGGGGAAAG | | | |
| | CCGAGAAGGAAGAACCCTCAG | | | |
| | GAAGGCCTGTACAATGAACTG | | | |
| | CAGAAAGATAAGATGGCGGAG | | | |
| | GCCTACAGTGAGATTGGGATG | | | |
| | AAAGGCGAGCGCCGGAGGGG | | | |
| | CAAGGGGCACGATGGCCTTTA | | | |
| | CCAGGGTCTCAGTACAGCCAC | | | |
| | CAAGGACACCTACGACGCCCT | | | |
| | TCACATGCAAGCTCTTCCACC | | | |
| | TCGT | | | |
| Linker | gGAACGCGTGGATCGGGA | 1173 | GTRGSG | 1174 |
| P2A | GCTACTAACTTCAGCCTGCTG | 1175 | ATNFSLLKQAGDVEENPGP | 1176 |
| | AAGCAGGCTGGAGACGTGGA | | | |
| | GGAGAACcccgggcct | | | |
| MyD88 | atggctgcaggaggtcccggcgcggggtct | 1177 | MAAGGPGAGSAAPVSSTSSLP | 1178 |
| | gcggccccggtctcctccacatcctcccttcc | | LAALNMRVRRRLSLFLNVRTQV | |
| | cctggctgctctcaacatgcgagtgcggcgc | | AADWTALAEEMDFEYLEIRQLE | |
| | cgcctgtctctgttcttgaacgtgcggacaca | | TQADPTGRLLDAWQGRPGASV | |
| | ggtggcggccgactggaccgcgctggcgg | | GRLLDLLTKLGRDDVLLELGPSI | |
| | aggagatggactttgagtacttggagatccg | | EEDCQKYILKQQQEEAEKPLQV | |
| | gcaactggagacacaagcggaccccact | | AAVDSSVPRTAELAGITTLDDPL | |
| | ggcaggctgctggacgcctggcagggacg | | GHMPERFDAFICYCPSDI | |
| | ccctggcgcctctgtaggccgactgctcgat | | | |
| | ctgcttaccaagctgggccgcgacgacgtg | | | |
| | ctgctggagctgggacccagcattgaggag | | | |
| | gattgccaaaagtatatcttgaagcagcagc | | | |
| | aggaggaggctgagaagcctttacaggtg | | | |
| | gccgctgtagacagcagtgtcccacggac | | | |
| | agcagagctggcgggcatcaccacacttg | | | |
| | atgaccccctggggcatatgcctgagcgttt | | | |
| | cgatgccttcatctgctattgccccagcgaca | | | |
| | tc | | | |
| Linker | gtcgag | 1179 | VE | 1180 |
| CD40 | aaaaaggtggccaagaagccaaccaata | 1181 | KKVAKKPTNKAPHPKQEPQEIN | 1182 |
| | aggccccccaccccaagcaggagcccca | | FPDDLPGSNTAAPVQETLHGC | |
| | ggagatcaattttcccgacgatcttcctggct | | QPVTQEDGKESRISVQERQ | |
| | ccaacactgctgctccagtgcaggagacttt | | | |
| | acatggatgccaaccggtcacccaggagg | | | |
| | atggcaaagagagtcgcatctcagtgcagg | | | |
| | agagacag | | | |
| Linker | gtcgag | 1183 | VE | 1184 |
| FKBPᵥ′ | GGcGTcCAaGTcGAaACcATtagt | 1185 | GVQVETISPGDGRTFPKRGQTC | 1186 |
| | CCcGGcGAtGGcaGaACaTTtCCt | | VVHYTGMLEDGKKVDSSRDRN | |
| | AAaaGgGGaCAaACaTGtGTcGT | | KPFKFMLGKQEVIRGWEEGVA | |
| | cCAtTAtACaGGcATGtTgGAgGA | | QMSVGQRAKLTISPDYAYGATG | |
| | cGGcAAaAAgGTgGAcagtagtaGa | | HPGIIPPHATLVFDVELLKLE | |
| | GAtcGcAAtAAaCCtTTcAAaTTcA | | | |
| | TGtTgGGaAAaCAaGAaGTcATta | | | |
| | GgGGaTGGGAgGAgGGcGTgG | | | |
| | CtCAaATGtccGTcGGcCAacGcG | | | |
| | CtAAgCTcACcATcagcCCcGAcT | | | |
| | AcGCaTAcGGcGCtACcGGaCAt | | | |
| | CCcGGaATtATtCCcCCtCAcGCt | | | |
| | ACctTgGTgTTtGAcGTcGAaCTgt | | | |
| | TgAAgCTcGAa | | | |
| Linker | gtcgag | 1187 | VE | 1188 |
| FKBPᵥ | ggagtgcaggtggagactatctccccagga | 1189 | GVQVETISPGDGRTFPKRGQTC | 1190 |
| | gacgggcgcaccttccccaagcgcggcca | | VVHYTGMLEDGKKVDSSRDRN | |
| | gacctgcgtggtgcactacaccgggatgctt | | KPFKFMLGKQEVIRGWEEGVA | |
| | gaagatggaaagaaagttgattcctcccgg | | QMSVGQRAKLTISPDYAYGATG | |
| | gacagaaacaagccctttaagtttatgctag | | HPGIIPPHATLVFDVELLKLE | |
| | gcaagcaggaggtgatccgaggctggga | | | |
| | agaaggggttgcccagatgagtgtgggtca | | | |
| | gagagccaaactgactatatctccagattat | | | |
| | gcctatggtgccactgggcacccaggcatc | | | |
| | atcccaccacatgccactctcgtcttcgatgt | | | |
| | ggagcttctaaaactggaa | | | |
| STOP | TGA | 1191 | stop | |

APPENDIX 7
pBP1319--pSFG-FKBP.FRB.ΔC9.T2A-αPSCA.Q.CD8stm.ζ.P2A-MC.FKBPᵥ

| Fragment | Nucleotide | SEQ ID NO: | Peptide | SEQ ID NO: |
|---|---|---|---|---|
| Leader peptide | ATGCtcgagcaattg | 1192 | MLEQL | 1193 |
| FKBP″ wt | GGcGTGCAaGTGGAaACTA | 1194 | GVQVETISPGDGRTFPKRGQTC | 1195 |
| | TaAGCCCgGGAGAcGGCcG | | VVHYTGMLEDGKKFDSSRDRN | |
| | cACATTtCCCAAgAGAGGcC | | KPFKFMLGKQEVIRGWEEGVA | |
| | AGACcTGCGTgGTGCAcTA | | QMSVGQRAKLTISPDYAYGATG | |
| | TACaGGAATGCTGGAgGAC | | HPGIIPPHATLVFDVELLKLE | |
| | GGgAAGAAaTTCGAtAGCtc | | | |
| | CCGGGAtCGAAAtAAGCCtT | | | |
| | TCAAaTTCATGCTGGGcAA | | | |
| | GCAaGAAGTcATCaGaGGC | | | |
| | TGGGAaGAAGGcGTCGCcC | | | |
| | AGATGTCcGTGGGtCAGcG | | | |
| | cGCCAAgCTGACaATTAGtC | | | |
| | CAGAtTACGCcTATGGcGCA | | | |
| | ACaGGCCAtCCCGGcATCA | | | |
| | TcCCCCCaCATGCcACACTc | | | |
| | GTCTTtGATGTcGAGCTcCT | | | |
| | GAAaCTGGAg | | | |
| Linker | GGCGGGcaattg | 1196 | ggql | 1197 |
| FRB | gaaatgTGGCATGAAGGGTT | 1198 | EMWHEGLEEASRLYFGERNVK | 1199 |
| | GGAAGAAGCTTCAAGGCT | | GMFEVLEPLHAMMERGPQTLK | |
| | GTACTTCGGAGAGAGGAA | | ETSFNQAYGRDLMEAQEWCRK | |
| | CGTGAAGGGCATGTTTGA | | YMKSGNVKDLTQAWDLYYHVF | |
| | GGTTCTTGAACCTCTGCAC | | RRISK | |
| | GCCATGATGGAACGGGGA | | | |
| | CCGCAGACACTGAAAGAA | | | |
| | ACCTCTTTTAATCAGGCCT | | | |
| | ACGGCAGAGACCTGATGG | | | |
| | AGGCCCAAGAATGGTGTA | | | |
| | GAAAGTATATGAAATCCGG | | | |
| | TAACGTGAAAGACCTGactC | | | |
| | AGGCCTGGGACCTTTATTA | | | |
| | CCATGTGTTCAGGCGGAT | | | |
| | CAGTAAG | | | |
| Linker | TCAGGCGGTGGCTCAGGT | 1200 | SGGGSGPW | 1201 |
| | ccatgg | | | |
| Δcaspase-9_{Q} | GGATTTGGTGATGTCGGT | 1202 | GFGDVGALESLRGNADLAYILS | 1203 |
| | GCTCTTGAGAGTTTGAGG | | MEPCGHCLIINNVNFCRESGLR | |
| | GGAAATGCAGATTTGGCTT | | TRTGSNIDCEKLRRRFSSLHFM | |
| | ACATCCTGAGCATGGAGC | | VEVKGDLTAKKMVLALLELARQ | |
| | CCTGTGGCCACTGCCTCA | | DHGALDCCVVVILSHGCQASHL | |
| | TTATCAACAATGTGAACTT | | QFPGAVYGTDGCPVSVEKIVNI | |
| | CTGCCGTGAGTCCGGGCT | | FNGTSCPSLGGKPKLFFIQACG | |
| | CCGCACCCGCACTGGCTC | | GEQKDHGFEVASTSPEDESPG | |
| | CAACATCGACTGTGAGAA | | SNPEPDATPFQEGLRTFDQLDA | |
| | GTTGCGGCGTCGCTTCTC | | ISSLPTPSDIFVSYSTFPGFVSW | |
| | CTCGCTGCATTTCATGGTG | | RDPKSGSWYVETLDDIFEQWA | |
| | GAGGTGAAGGGCGACCTG | | HSEDLQSLLLRVANAVSVKGIYK | |
| | ACTGCCAAGAAAATGGTG | | QMPGCFQFLRKKLFFKTSASRA | |
| | CTGGCTTTGCTGGAGCTG | | | |
| | GCGCgGCAGGACCACGGT | | | |
| | GCTCTGGACTGCTGCGTG | | | |
| | GTGGTCATTCTCTCTCACG | | | |
| | GCTGTCAGGCCAGCCACC | | | |
| | TGCAGTTCCCAGGGGCTG | | | |
| | TCTACGGCACAGATGGAT | | | |
| | GCCCTGTGTCGGTCGAGA | | | |
| | AGATTGTGAACATCTTCAA | | | |
| | TGGGACCAGCTGCCCCAG | | | |
| | CCTGGGAGGGAAGCCCAA | | | |
| | GCTCTTTTTCATCCAGGCC | | | |
| | TGTGGTGGGGAGCAGAAA | | | |
| | GAtCATGGGTTTGAGGTGG | | | |
| | CCTCCACTTCCCCTGAAGA | | | |
| | CGAGTCCCCTGGCAGTAA | | | |
| | CCCCGAGCCAGATGCCAC | | | |
| | CCCGTTCCAGGAAGGTTT | | | |
| | GAGGACCTTCGACCAGCT | | | |
| | GGACGCCATATCTAGTTTG | | | |
| | CCCACACCCAGTGACATCT | | | |
| | TTGTGTCCTACTCTACTTT | | | |
| | CCCAGGTTTTGTTTCCTGG | | | |
| | AGGGACCCCAAGAGTGGC | | | |
| | TCCTGGTACGTTGAGACC | | | |
| | CTGGACGACATCTTTGAGC | | | |
| | AGTGGGCTCACTCTGAAG | | | |
| | ACCTGCAGTCCCTCCTGCT | | | |
| | TAGGGTCGCTAATGCTGTT | | | |
| | TCGGTGAAAGGGATTTATA | | | |
| | AACAGATGCCTGGTTGCTT | | | |
| | TcAaTTCCTCCGGAAAAAA | | | |
| | CTTTTCTTTAAAACATCAG | | | |
| | CTAGCAGAGCC | | | |
| Linker | ggatctggaccgcGG | 1204 | GSGPR | 1205 |
| T2A | GAAGGCCGAGGGAGCCTG | 1206 | EGRGSLLTCGDVEENPGP | 1207 |
| | CTGACATGTGGCGATGTG | | | |
| | GAGGAAAACCCAGGACCA | | | |
| Linker | CCATGG | 1208 | PW | 1209 |
| Signal Peptide | ATGGAGTTTGGACTTTCTT | 1210 | MEFGLSWLFLVAILKGVQCSR | 1211 |
| | GGTTGTTTTTGGTGGCAAT | | | |
| | TCTGAAGGGTGTCCAGTG | | | |
| | TAGCAGG | | | |
| PSCA(A11) VL | GACATCCAACTGACGCAAA | 1212 | DIQLTQSPSTLSASMGDRVTITC | 1213 |
| | GCCCATCTACACTCAGCG | | SASSSVRFIHWYQQKPGKAPK | |
| | CTAGCATGGGGGACAGGG | | RLIYDTSKLASGVPSRFSGSGS | |
| | TCACAATCACGTGCTCTGC | | GTDFTLTISSLQPEDFATYYCQ | |
| | CTCAAGTTCCGTTAGGTTT | | QWGSSPFTFGQGTKVEIK | |
| | ATCCATTGGTATCAGCAGA | | | |
| | AACCTGGAAAGGCCCCAA | | | |
| | AAAGACTGATCTATGATAC | | | |
| | CAGCAAGCTGGCTTCCGG | | | |
| | AGTGCCCTCAAGGTTCTCA | | | |
| | GGATCTGGCAGTGGGACC | | | |
| | GATTTCACCCTGACAATTA | | | |
| | GCAGCCTTCAGCCAGAGG | | | |
| | ATTTCGCAACCTATTACTG | | | |
| | TCAGCAATGGGGGTCCAG | | | |
| | CCCATTCACTTTCGGCCAA | | | |
| | GGAACAAAGGTGGAGATA | | | |
| | AAA | | | |
| Flex | GGCGGAGGAAGCGGAGG | 1214 | gggsgggg | 1215 |
| | TGGGGGC | | | |
| PSCA(A11) VH | GAGGTGCAGCTCGTGGAG | 1216 | EVQLVEYGGGLVQPGGSLRLS | 1217 |
| | TATGGCGGGGGCCTGGTG | | CAASGFNIKDYYIHWVRQAPGK | |
| | CAGCCTGGGGGTAGTCTG | | GLEWVAWIDPENGDTEFVPKF | |
| | AGGCTCTCCTGCGCTGCC | | QGRATMSADTSKNTAYLQMNS | |
| | TCTGGCTTTAACATTAAAG | | LRAEDTAVYYCKTGGFWGQGT | |
| | ACTACTACATACATTGGGT | | LVTVSS | |
| | GCGGCAGGCCCCAGGCAA | | | |
| | AGGGCTCGAATGGGTGGC | | | |
| | CTGGATTGACCCTGAGAAT | | | |
| | GGTGACACTGAGTTTGTCC | | | |
| | CCAAGTTTCAGGGCAGAG | | | |
| | CCACCATGAGCGCTGACA | | | |
| | CAAGCAAAAACACTGCTTA | | | |
| | TCTCCAAATGAATAGCCTG | | | |
| | CGAGCTGAAGATACAGCA | | | |
| | GTCTATTACTGCAAGACGG | | | |
| | GAGGATTCTGGGGCCAGG | | | |
| | GAACTCTGGTGACAGTTAG | | | |
| | TTCC | | | |
| Linker | GGATCC | 1218 | gs | 1219 |
| CD34 epitope | GAACTTCCTACTCAGGGG | 1220 | ELPTQGTFSNVSTNVS | 1221 |
| | ACTTTCTCAAACGTTAGCA | | | |
| | CAAACGTAAGT | | | |
| CD8 stalk | CCCGCCCCAAGACCCCCC | 1222 | PAPRPPTPAPTIASQPLSLRPEA | 1223 |
| | ACACCTGCGCCGACCATT | | CRPAAGGAVHTRGLDFACD | |
| | GCTTCTCAACCCCTGAGTT | | | |
| | TGAGACCCGAGGCCTGCC | | | |
| | GGCCAGCTGCCGGCGGG | | | |
| | GCCGTGCATACAAGAGGA | | | |
| | CTCGATTTCGCTTGCGAC | | | |
| CD8 | ATCTATATCTGGGCACCTC | 1224 | IYIWAPLAGTCGVLLLSLVITLYC | 1225 |
| transmembrane | TCGCTGGCACCTGTGGAG | | NHRNRRRVCKCPR | |
| | TCCTTCTGCTCAGCCTGGT | | | |
| | TATTACTCTGTACTGTAAT | | | |
| | CACCGGAATCGCCGCCGC | | | |
| | GTTTGTAAGTGTCCCAGG | | | |
| Linker | GTCGAC | 1226 | VD | 1227 |
| CD3ζ | AGAGTGAAGTTCAGCAGG | 1228 | RVKFSRSADAPAYQQGQNQLY | 1229 |
| | AGCGCAGACGCCCCCGCG | | NELNLGRREEYDVLDKRRGRD | |
| | TACCAGCAGGGCCAGAAC | | PEMGGKPRRKNPQEGLYNELQ | |
| | CAGCTCTATAACGAGCTCA | | KDKMAEAYSEIGMKGERRRGK | |
| | ATCTAGGACGAAGAGAGG | | GHDGLYQGLSTATKDTYDALH | |
| | AGTACGATGTTTTGGACAA | | MQALPPR | |
| | GAGACGTGGCCGGGACCC | | | |
| | TGAGATGGGGGGAAAGCC | | | |
| | GAGAAGGAAGAACCCTCA | | | |
| | GGAAGGCCTGTACAATGA | | | |
| | ACTGCAGAAAGATAAGATG | | | |
| | GCGGAGGCCTACAGTGAG | | | |
| | ATTGGGATGAAAGGCGAG | | | |
| | CGCCGGAGGGGCAAGGG | | | |
| | GCACGATGGCCTTTACCA | | | |
| | GGGTCTCAGTACAGCCAC | | | |
| | CAAGGACACCTACGACGC | | | |
| | CCTTCACATGCAAGCTCTT | | | |
| | CCACCTCGT | | | |
| Linker | gGAACGCGTGGATCGGGA | 1230 | GTRGSG | 1231 |
| P2A | GCTACTAACTTCAGCCTGC | 1232 | ATNFSLLKQAGDVEENPGP | 1233 |
| | TGAAGCAGGCTGGAGACG | | | |
| | TGGAGGAGAACcccgggcct | | | |
| MyD88 | atggctgcaggaggtcccggcgcggg | 1234 | MAAGGPGAGSAAPVSSTSSLP | 1235 |
| | gtctgcggccccggtctcctccacatcc | | LAALNMRVRRRLSLFLNVRTQV | |
| | tcccttcccctggctgctctcaacatgcg | | AADWTALAEEMDFEYLEIRQLE | |
| | agtgcggcgccgcctgtctctgttcttga | | TQADPTGRLLDAWQGRPGASV | |
| | acgtgcggacacaggtggcggccga | | GRLLDLLTKLGRDDVLLELGPSI | |
| | ctggaccgcgctggcggaggagatg | | EEDCQKYILKQQQEEAEKPLQV | |
| | gactttgagtacttggagatccggcaa | | AAVDSSVPRTAELAGITTLDDPL | |
| | ctggagacacaagcggaccccactg | | GHMPERFDAFICYCPSDI | |
| | gcaggctgctggacgcctggcaggga | | | |
| | cgccctggcgcctctgtaggccgactg | | | |
| | ctcgatctgcttaccaagctgggccgc | | | |
| | gacgacgtgctgctggagctgggacc | | | |
| | cagcattgaggaggattgccaaaagt | | | |
| | atatcttgaagcagcagcaggaggag | | | |
| | gctgagaagcctttacaggtggccgct | | | |
| | gtagacagcagtgtcccacggacagc | | | |
| | agagctggcgggcatcaccacacttg | | | |
| | atgaccccctggggcatatgcctgagc | | | |
| | gtttcgatgccttcatctgctattgcccca | | | |
| | gcgacatc | | | |
| Linker | gtcgag | 1236 | VE | 1237 |
| CD40 | aaaaaggtggccaagaagccaacc | 1238 | KKVAKKPTNKAPHPKQEPQEIN | 1239 |
| | aataaggccccccaccccaagcagg | | FPDDLPGSNTAAPVQETLHGC | |
| | agccccaggagatcaattttcccgacg | | QPVTQEDGKESRISVQERQ | |
| | atcttcctggctccaacactgctgctcca | | | |
| | gtgcaggagactttacatggatgccaa | | | |
| | ccggtcacccaggaggatggcaaag | | | |
| | agagtcgcatctcagtgcaggagaga | | | |
| | cag | | | |
| Linker | gtcgag | 1240 | VE | 1241 |
| FKBPᵥ | ggagtgcaggtggagactatctcccca | 1242 | GVQVETISPGDGRTFPKRGQTC | 1243 |
| | ggagacgggcgcaccttccccaagc | | VVHYTGMLEDGKKVDSSRDRN | |
| | gcggccagacctgcgtggtgcactac | | KPFKFMLGKQEVIRGWEEGVA | |
| | accgggatgcttgaagatggaaagaa | | QMSVGQRAKLTISPDYAYGATG | |
| | agttgattcctcccgggacagaaacaa | | HPGIIPPHATLVFDVELLKLE | |
| | gccctttaagtttatgctaggcaagcag | | | |
| | gaggtgatccgaggctgggaagaag | | | |
| | gggttgcccagatgagtgtgggtcaga | | | |
| | gagccaaactgactatatctccagatta | | | |
| | tgcctatggtgccactgggcacccagg | | | |
| | catcatcccaccacatgccactctcgtc | | | |
| | ttcgatgtggagcttctaaaactggaa | | | |
| STOP | TGA | 1244 | stop | |

APPENDIX 8
pBP1320--pSFG-FKBP.FRB.ΔC9.T2A-αPSCA.Q.CD8stm.ζ.P2A-MC

| Fragment | Nucleotide | SEQ ID NO: | Peptide | SEQ ID NO: |
|---|---|---|---|---|
| Leader peptide | ATGCtcgagcaattg | 1245 | MLEQL | 1246 |
| FKBP″ wt | GGcGTGCAaGTGGAaACTA | 1247 | GVQVETISPGDGRTFPKRGQTCV | 1248 |
| | TaAGCCCgGGAGAcGGCcG | | VHYTGMLEDGKKFDSSRDRNKPF | |
| | cACATTtCCCAAgAGAGGcC | | KFMLGKQEVIRGWEEGVAQMSV | |
| | AGACcTGCGTgGTGCAcTA | | GQRAKLTISPDYAYGATGHPGIIPP | |
| | TACaGGAATGCTGGAgGAC | | HATLVFDVELLKLE | |
| | GGgAAGAAaTTCGAtAGCtc | | | |
| | CCGGGAtCGAAAtAAGCCtT | | | |
| | TCAAaTTCATGCTGGGcAA | | | |
| | GCAaGAAGTcATCaGaGGC | | | |
| | TGGGAaGAAGGcGTCGCcC | | | |
| | AGATGTCcGTGGGtCAGcG | | | |
| | cGCCAAgCTGACaATTAGtC | | | |
| | CAGAtTACGCcTATGGcGCA | | | |
| | ACaGGCCAtCCCGGcATCA | | | |
| | TcCCCCCaCATGCcACACTc | | | |
| | GTCTTtGATGTcGAGCTcCT | | | |
| | GAAaCTGGAg | | | |
| Linker | GGCGGGcaattg | 1249 | ggql | 1250 |
| FRB | gaaatgTGGCATGAAGGGTT | 1251 | EMWHEGLEEASRLYFGERNVKG | 1252 |
| | GGAAGAAGCTTCAAGGCT | | MFEVLEPLHAMMERGPQTLKETS | |
| | GTACTTCGGAGAGAGGAA | | FNQAYGRDLMEAQEWCRKYMKS | |
| | CGTGAAGGGCATGTTTGA | | GNVKDLTQAWDLYYHVFRRISK | |
| | GGTTCTTGAACCTCTGCAC | | | |
| | GCCATGATGGAACGGGGA | | | |
| | CCGCAGACACTGAAAGAA | | | |
| | ACCTCTTTTAATCAGGCCT | | | |
| | ACGGCAGAGACCTGATGG | | | |
| | AGGCCCAAGAATGGTGTA | | | |
| | GAAAGTATATGAAATCCGG | | | |
| | TAACGTGAAAGACCTGactC | | | |
| | AGGCCTGGGACCTTTATTA | | | |
| | CCATGTGTTCAGGCGGAT | | | |
| | CAGTAAG | | | |
| Linker | TCAGGCGGTGGCTCAGGT | 1253 | SGGGSGPW | 1254 |
| | ccatgg | | | |
| Δcaspase-9_{Q} | GGATTTGGTGATGTCGGT | 1255 | GFGDVGALESLRGNADLAYILSME | 1256 |
| | GCTCTTGAGAGTTTGAGG | | PCGHCLIINNVNFCRESGLRTRTG | |
| | GGAAATGCAGATTTGGCTT | | SNIDCEKLRRRFSSLHFMVEVKGD | |
| | ACATCCTGAGCATGGAGC | | LTAKKMVLALLELARQDHGALDCC | |
| | CCTGTGGCCACTGCCTCA | | VVVILSHGCQASHLQFPGAVYGTD | |
| | TTATCAACAATGTGAACTT | | GCPVSVEKIVNIFNGTSCPSLGGK | |
| | CTGCCGTGAGTCCGGGCT | | PKLFFIQACGGEQKDHGFEVASTS | |
| | CCGCACCCGCACTGGCTC | | PEDESPGSNPEPDATPFQEGLRT | |
| | CAACATCGACTGTGAGAA | | FDQLDAISSLPTPSDIFVSYSTFPG | |
| | GTTGCGGCGTCGCTTCTC | | FVSWRDPKSGSWYVETLDDIFEQ | |
| | CTCGCTGCATTTCATGGTG | | WAHSEDLQSLLLRVANAVSVKGIY | |
| | GAGGTGAAGGGCGACCTG | | KQMPGCFQFLRKKLFFKTSASRA | |
| | ACTGCCAAGAAAATGGTG | | | |
| | CTGGCTTTGCTGGAGCTG | | | |
| | GCGCgGCAGGACCACGGT | | | |
| | GCTCTGGACTGCTGCGTG | | | |
| | GTGGTCATTCTCTCTCACG | | | |
| | GCTGTCAGGCCAGCCACC | | | |
| | TGCAGTTCCCAGGGGCTG | | | |
| | TCTACGGCACAGATGGAT | | | |
| | GCCCTGTGTCGGTCGAGA | | | |
| | AGATTGTGAACATCTTCAA | | | |
| | TGGGACCAGCTGCCCCAG | | | |
| | CCTGGGAGGGAAGCCCAA | | | |
| | GCTCTTTTTCATCCAGGCC | | | |
| | TGTGGTGGGGAGCAGAAA | | | |
| | GAtCATGGGTTTGAGGTGG | | | |
| | CCTCCACTTCCCCTGAAGA | | | |
| | CGAGTCCCCTGGCAGTAA | | | |
| | CCCCGAGCCAGATGCCAC | | | |
| | CCCGTTCCAGGAAGGTTT | | | |
| | GAGGACCTTCGACCAGCT | | | |
| | GGACGCCATATCTAGTTTG | | | |
| | CCCACACCCAGTGACATCT | | | |
| | TTGTGTCCTACTCTACTTT | | | |
| | CCCAGGTTTTGTTTCCTGG | | | |
| | AGGGACCCCAAGAGTGGC | | | |
| | TCCTGGTACGTTGAGACC | | | |
| | CTGGACGACATCTTTGAGC | | | |
| | AGTGGGCTCACTCTGAAG | | | |
| | ACCTGCAGTCCCTCCTGCT | | | |
| | TAGGGTCGCTAATGCTGTT | | | |
| | TCGGTGAAAGGGATTTATA | | | |
| | AACAGATGCCTGGTTGCTT | | | |
| | TcAaTTCCTCCGGAAAAAA | | | |
| | CTTTTCTTTAAAACATCAG | | | |
| | CTAGCAGAGCC | | | |
| Linker | ggatctggaccgcGG | 1257 | GSGPR | 1258 |
| T2A | GAAGGCCGAGGGAGCCTG | 1259 | EGRGSLLTCGDVEENPGP | 1260 |
| | CTGACATGTGGCGATGTG | | | |
| | GAGGAAAACCCAGGACCA | | | |
| Linker | CCATGG | 1261 | PW | 1262 |
| Signal Peptide | ATGGAGTTTGGACTTTCTT | 1263 | MEFGLSWLFLVAILKGVQCSR | 1264 |
| | GGTTGTTTTTGGTGGCAAT | | | |
| | TCTGAAGGGTGTCCAGTG | | | |
| | TAGCAGG | | | |
| PSCA(A11) VL | GACATCCAACTGACGCAAA | 1265 | DIQLTQSPSTLSASMGDRVTITCS | 1266 |
| | GCCCATCTACACTCAGCG | | ASSSVRFIHWYQQKPGKAPKRLIY | |
| | CTAGCATGGGGGACAGGG | | DTSKLASGVPSRFSGSGSGTDFT | |
| | TCACAATCACGTGCTCTGC | | LTISSLQPEDFATYYCQQWGSSPF | |
| | CTCAAGTTCCGTTAGGTTT | | TFGQGTKVEIK | |
| | ATCCATTGGTATCAGCAGA | | | |
| | AACCTGGAAAGGCCCCAA | | | |
| | AAAGACTGATCTATGATAC | | | |
| | CAGCAAGCTGGCTTCCGG | | | |
| | AGTGCCCTCAAGGTTCTCA | | | |
| | GGATCTGGCAGTGGGACC | | | |
| | GATTTCACCCTGACAATTA | | | |
| | GCAGCCTTCAGCCAGAGG | | | |
| | ATTTCGCAACCTATTACTG | | | |
| | TCAGCAATGGGGGTCCAG | | | |
| | CCCATTCACTTTCGGCCAA | | | |
| | GGAACAAAGGTGGAGATA | | | |
| | AAA | | | |
| Flex | GGCGGAGGAAGCGGAGG | 1267 | gggsgggg | 1268 |
| | TGGGGGC | | | |
| PSCA(A11) VH | GAGGTGCAGCTCGTGGAG | 1269 | EVQLVEYGGGLVQPGGSLRLSCA | 1270 |
| | TATGGCGGGGGCCTGGTG | | ASGFNIKDYYIHWVRQAPGKGLE | |
| | CAGCCTGGGGGTAGTCTG | | WVAWIDPENGDTEFVPKFQGRAT | |
| | AGGCTCTCCTGCGCTGCC | | MSADTSKNTAYLQMNSLRAEDTA | |
| | TCTGGCTTTAACATTAAAG | | VYYCKTGGFWGQGTLVTVSS | |
| | ACTACTACATACATTGGGT | | | |
| | GCGGCAGGCCCCAGGCAA | | | |
| | AGGGCTCGAATGGGTGGC | | | |
| | CTGGATTGACCCTGAGAAT | | | |
| | GGTGACACTGAGTTTGTCC | | | |
| | CCAAGTTTCAGGGCAGAG | | | |
| | CCACCATGAGCGCTGACA | | | |
| | CAAGCAAAAACACTGCTTA | | | |
| | TCTCCAAATGAATAGCCTG | | | |
| | CGAGCTGAAGATACAGCA | | | |
| | GTCTATTACTGCAAGACGG | | | |
| | GAGGATTCTGGGGCCAGG | | | |
| | GAACTCTGGTGACAGTTAG | | | |
| | TTCC | | | |
| Linker | GGATCC | 1271 | gs | 1272 |
| CD34 epitope | GAACTTCCTACTCAGGGG | 1273 | ELPTQGTFSNVSTNVS | 1274 |
| | ACTTTCTCAAACGTTAGCA | | | |
| | CAAACGTAAGT | | | |
| CD8 stalk | CCCGCCCCAAGACCCCCC | 1275 | PAPRPPTPAPTIASQPLSLRPEAC | 1276 |
| | ACACCTGCGCCGACCATT | | RPAAGGAVHTRGLDFACD | |
| | GCTTCTCAACCCCTGAGTT | | | |
| | TGAGACCCGAGGCCTGCC | | | |
| | GGCCAGCTGCCGGCGGG | | | |
| | GCCGTGCATACAAGAGGA | | | |
| | CTCGATTTCGCTTGCGAC | | | |
| CD8 | ATCTATATCTGGGCACCTC | 1277 | IYIWAPLAGTCGVLLLSLVITLYCN | 1278 |
| transmembrane | TCGCTGGCACCTGTGGAG | | HRNRRRVCKCPR | |
| | TCCTTCTGCTCAGCCTGGT | | | |
| | TATTACTCTGTACTGTAAT | | | |
| | CACCGGAATCGCCGCCGC | | | |
| | GTTTGTAAGTGTCCCAGG | | | |
| Linker | GTCGAC | 1279 | VD | 1280 |
| CD3ζ | AGAGTGAAGTTCAGCAGG | 1281 | RVKFSRSADAPAYQQGQNQLYNE | 1282 |
| | AGCGCAGACGCCCCCGCG | | LNLGRREEYDVLDKRRGRDPEMG | |
| | TACCAGCAGGGCCAGAAC | | GKPRRKNPQEGLYNELQKDKMAE | |
| | CAGCTCTATAACGAGCTCA | | AYSEIGMKGERRRGKGHDGLYQG | |
| | ATCTAGGACGAAGAGAGG | | LSTATKDTYDALHMQALPPR | |
| | AGTACGATGTTTTGGACAA | | | |
| | GAGACGTGGCCGGGACCC | | | |
| | TGAGATGGGGGGAAAGCC | | | |
| | GAGAAGGAAGAACCCTCA | | | |
| | GGAAGGCCTGTACAATGA | | | |
| | ACTGCAGAAAGATAAGATG | | | |
| | GCGGAGGCCTACAGTGAG | | | |
| | ATTGGGATGAAAGGCGAG | | | |
| | CGCCGGAGGGGCAAGGG | | | |
| | GCACGATGGCCTTTACCA | | | |
| | GGGTCTCAGTACAGCCAC | | | |
| | CAAGGACACCTACGACGC | | | |
| | CCTTCACATGCAAGCTCTT | | | |
| | CCACCTCGT | | | |
| P2A | GCAACGAATTTTTCCCTGC | 1283 | ATNFSLLKQAGDVEENPGP | 1284 |
| | TGAAACAGGCAGGGGACG | | | |
| | TAGAGGAAAATCCTGGTCCT | | | |
| MyD88 | atggctgcaggaggtcccggcgcggg | 1285 | MAAGGPGAGSAAPVSSTSSLPLA | 1286 |
| | gtctgcggccccggtctcctccacatcc | | ALNMRVRRRLSLFLNVRTQVAAD | |
| | tcccttcccctggctgctctcaacatgcg | | WTALAEEMDFEYLEIRQLETQADP | |
| | agtgcggcgccgcctgtctctgttcttga | | TGRLLDAWQGRPGASVGRLLDLL | |
| | acgtgcggacacaggtggcggccga | | TKLGRDDVLLELGPSIEEDCQKYIL | |
| | ctggaccgcgctggaggaggagatg | | KQQQEEAEKPLQVAAVDSSVPRT | |
| | gactttgagtacttggagatccggcaa | | AELAGITTLDDPLGHMPERFDAFIC | |
| | ctggagacacaagcggaccccactg | | YCPSDI | |
| | gcaggctgctggacgcctggcaggga | | | |
| | cgccctggcgcctctgtaggccgactg | | | |
| | ctcgatctgcttaccaagctgggccgc | | | |
| | gacgacgtgctgctggagctgggacc | | | |
| | cagcattgaggaggattgccaaaagt | | | |
| | atatcttgaagcagcagcaggaggag | | | |
| | gctgagaagcctttacaggtggccgct | | | |
| | gtagacagcagtgtcccacggacagc | | | |
| | agagctggcgggcatcaccacacttg | | | |
| | atgaccccctggggcatatgcctgagc | | | |
| | gtttcgatgccttcatctgctattgcccca | | | |
| | gcgacatc | | | |
| Linker | gtcgag | 1287 | VE | 1288 |
| CD40 | aaaaaggtggccaagaagccaacc | 1289 | KKVAKKPTNKAPHPKQEPQEINFP | 1290 |
| | aataaggccccccaccccaagcagg | | DDLPGSNTAAPVQETLHGCQPVT | |
| | agccccaggagatcaattttcccgacg | | QEDGKESRISVQERQ | |
| | atcttcctggctccaacactgctgctcca | | | |
| | gtgcaggagactttacatggatgccaa | | | |
| | ccggtcacccaggaggatggcaaag | | | |
| | agagtcgcatctcagtgcaggagaga | | | |
| | cag | | | |
| STOP | TGA | 1291 | stop | |

APPENDIX 9
pBP1321--pSFG-FKBP.FRB.ΔC9.T2A-αPSCA.Q.CD8stm.ζ.P2A-MC.FKBPᵥ.FKBP

| Fragment | Nucleotide | SEQ ID NO: | Peptide | SEQ ID NO: |
|---|---|---|---|---|
| Leader peptide | ATGCtcgagcaattg | 1292 | MLEQL | 1293 |
| FKBP″ wt | GGcGTGCAaGTGGAaACTA | 1294 | GVQVETISPGDGRTFPKRGQTCV | 1295 |
| | TaAGCCCgGGAGAcGGCcG | | VHYTGMLEDGKKFDSSRDRNKPF | |
| | cACATTtCCCAAgAGAGGcC | | KFMLGKQEVIRGWEEGVAQMSV | |
| | AGACcTGCGTgGTGCAcTA | | GQRAKLTISPDYAYGATGHPGIIPP | |
| | TACaGGAATGCTGGAgGAC | | HATLVFDVELLKLE | |
| | GGgAAGAAaTTCGAtAGCtc | | | |
| | CCGGGAtCGAAAtAAGCCtT | | | |
| | TCAAaTTCATGCTGGGcAA | | | |
| | GCAaGAAGTcATCaGaGGC | | | |
| | TGGGAaGAAGGcGTCGCcC | | | |
| | AGATGTCcGTGGGtCAGcG | | | |
| | cGCCAAgCTGACaATTAGtC | | | |
| | CAGAtTACGCcTATGGcGCA | | | |
| | ACaGGCCAtCCCGGcATCA | | | |
| | TcCCCCCaCATGCcACACTc | | | |
| | GTCTTtGATGTcGAGCTcCT | | | |
| | GAAaCTGGAg | | | |
| Linker | GGCGGGcaattg | 1296 | ggql | 1297 |
| FRB | gaaatgTGGCATGAAGGGTT | 1298 | EMWHEGLEEASRLYFGERNVKG | 1299 |
| | GGAAGAAGCTTCAAGGCT | | MFEVLEPLHAMMERGPQTLKETS | |
| | GTACTTCGGAGAGAGGAA | | FNQAYGRDLMEAQEWCRKYMKS | |
| | CGTGAAGGGCATGTTTGA | | GNVKDLTQAWDLYYHVFRRISK | |
| | GGTTCTTGAACCTCTGCAC | | | |
| | GCCATGATGGAACGGGGA | | | |
| | CCGCAGACACTGAAAGAA | | | |
| | ACCTCTTTTAATCAGGCCT | | | |
| | ACGGCAGAGACCTGATGG | | | |
| | AGGCCCAAGAATGGTGTA | | | |
| | GAAAGTATATGAAATCCGG | | | |
| | TAACGTGAAAGACCTGactC | | | |
| | AGGCCTGGGACCTTTATTA | | | |
| | CCATGTGTTCAGGCGGAT | | | |
| | CAGTAAG | | | |
| Linker | TCAGGCGGTGGCTCAGGT | 1300 | SGGGSGPW | 1301 |
| | ccatgg | | | |
| Δcaspase9 | GGATTTGGTGATGTCGGT | 1302 | GFGDVGALESLRGNADLAYILSME | 1303 |
| | GCTCTTGAGAGTTTGAGG | | PCGHCLIINNVNFCRESGLRTRTG | |
| | GGAAATGCAGATTTGGCTT | | SNIDCEKLRRRFSSLHFMVEVKGD | |
| | ACATCCTGAGCATGGAGC | | LTAKKMVLALLELARQDHGALDCC | |
| | CCTGTGGCCACTGCCTCA | | VVVILSHGCQASHLQFPGAVYGTD | |
| | TTATCAACAATGTGAACTT | | GCPVSVEKIVNIFNGTSCPSLGGK | |
| | CTGCCGTGAGTCCGGGCT | | PKLFFIQACGGEQKDHGFEVASTS | |
| | CCGCACCCGCACTGGCTC | | PEDESPGSNPEPDATPFQEGLRT | |
| | CAACATCGACTGTGAGAA | | FDQLDAISSLPTPSDIFVSYSTFPG | |
| | GTTGCGGCGTCGCTTCTC | | FVSWRDPKSGSWYVETLDDIFEQ | |
| | CTCGCTGCATTTCATGGTG | | WAHSEDLQSLLLRVANAVSVKGIY | |
| | GAGGTGAAGGGCGACCTG | | KQMPGCFNFLRKKLFFKTSASRA | |
| | ACTGCCAAGAAAATGGTG | | | |
| | CTGGCTTTGCTGGAGCTG | | | |
| | GCGCgGCAGGACCACGGT | | | |
| | GCTCTGGACTGCTGCGTG | | | |
| | GTGGTCATTCTCTCTCACG | | | |
| | GCTGTCAGGCCAGCCACC | | | |
| | TGCAGTTCCCAGGGGCTG | | | |
| | TCTACGGCACAGATGGAT | | | |
| | GCCCTGTGTCGGTCGAGA | | | |
| | AGATTGTGAACATCTTCAA | | | |
| | TGGGACCAGCTGCCCCAG | | | |
| | CCTGGGAGGGAAGCCCAA | | | |
| | GCTCTTTTTCATCCAGGCC | | | |
| | TGTGGTGGGGAGCAGAAA | | | |
| | GAtCATGGGTTTGAGGTGG | | | |
| | CCTCCACTTCCCCTGAAGA | | | |
| | CGAGTCCCCTGGCAGTAA | | | |
| | CCCCGAGCCAGATGCCAC | | | |
| | CCCGTTCCAGGAAGGTTT | | | |
| | GAGGACCTTCGACCAGCT | | | |
| | GGACGCCATATCTAGTTTG | | | |
| | CCCACACCCAGTGACATCT | | | |
| | TTGTGTCCTACTCTACTTT | | | |
| | CCCAGGTTTTGTTTCCTGG | | | |
| | AGGGACCCCAAGAGTGGC | | | |
| | TCCTGGTACGTTGAGACC | | | |
| | CTGGACGACATCTTTGAGC | | | |
| | AGTGGGCTCACTCTGAAG | | | |
| | ACCTGCAGTCCCTCCTGCT | | | |
| | TAGGGTCGCTAATGCTGTT | | | |
| | TCGGTGAAAGGGATTTATA | | | |
| | AACAGATGCCTGGTTGCTT | | | |
| | TAATTTCCTCCGGAAAAAA | | | |
| | CTTTTCTTTAAAACATCAG | | | |
| | CTAGCAGAGCC | | | |
| Linker | ggatctggaccgcGG | 1304 | GSGPR | 1305 |
| T2A | GAAGGCCGAGGGAGCCTG | 1306 | EGRGSLLTCGDVEENPGP | 1307 |
| | CTGACATGTGGCGATGTG | | | |
| | GAGGAAAACCCAGGACCA | | | |
| Linker | CCATGG | 1308 | PW | 1309 |
| Signal Peptide | ATGGAGTTTGGACTTTCTT | 1310 | MEFGLSWLFLVAILKGVQCSR | 1311 |
| | GGTTGTTTTTGGTGGCAAT | | | |
| | TCTGAAGGGTGTCCAGTG | | | |
| | TAGCAGG | | | |
| PSCA(A11) VL | GACATCCAACTGACGCAAA | 1312 | DIQLTQSPSTLSASMGDRVTITCS | 1313 |
| | GCCCATCTACACTCAGCG | | ASSSVRFIHWYQQKPGKAPKRLIY | |
| | CTAGCATGGGGGACAGGG | | DTSKLASGVPSRFSGSGSGTDFT | |
| | TCACAATCACGTGCTCTGC | | LTISSLQPEDFATYYCQQWGSSPF | |
| | CTCAAGTTCCGTTAGGTTT | | TFGQGTKVEIK | |
| | ATCCATTGGTATCAGCAGA | | | |
| | AACCTGGAAAGGCCCCAA | | | |
| | AAAGACTGATCTATGATAC | | | |
| | CAGCAAGCTGGCTTCCGG | | | |
| | AGTGCCCTCAAGGTTCTCA | | | |
| | GGATCTGGCAGTGGGACC | | | |
| | GATTTCACCCTGACAATTA | | | |
| | GCAGCCTTCAGCCAGAGG | | | |
| | ATTTCGCAACCTATTACTG | | | |
| | TCAGCAATGGGGGTCCAG | | | |
| | CCCATTCACTTTCGGCCAA | | | |
| | GGAACAAAGGTGGAGATA | | | |
| | AAA | | | |
| Flex | GGCGGAGGAAGCGGAGG | 1314 | gggsgggg | 1315 |
| | TGGGGGC | | | |
| PSCA(A11) VH | GAGGTGCAGCTCGTGGAG | 1316 | EVQLVEYGGGLVQPGGSLRLSCA | 1317 |
| | TATGGCGGGGGCCTGGTG | | ASGFNIKDYYIHWVRQAPGKGLE | |
| | CAGCCTGGGGGTAGTCTG | | WVAWIDPENGDTEFVPKFQGRAT | |
| | AGGCTCTCCTGCGCTGCC | | MSADTSKNTAYLQMNSLRAEDTA | |
| | TCTGGCTTTAACATTAAAG | | VYYCKTGGFWGQGTLVTVSS | |
| | ACTACTACATACATTGGGT | | | |
| | GCGGCAGGCCCCAGGCAA | | | |
| | AGGGCTCGAATGGGTGGC | | | |
| | CTGGATTGACCCTGAGAAT | | | |
| | GGTGACACTGAGTTTGTCC | | | |
| | CCAAGTTTCAGGGCAGAG | | | |
| | CCACCATGAGCGCTGACA | | | |
| | CAAGCAAAAACACTGCTTA | | | |
| | TCTCCAAATGAATAGCCTG | | | |
| | CGAGCTGAAGATACAGCA | | | |
| | GTCTATTACTGCAAGACGG | | | |
| | GAGGATTCTGGGGCCAGG | | | |
| | GAACTCTGGTGACAGTTAG | | | |
| | TTCC | | | |
| Linker | GGATCC | 1318 | gs | 1319 |
| CD34 epitope | GAACTTCCTACTCAGGGG | 1320 | ELPTQGTFSNVSTNVS | 1321 |
| | ACTTTCTCAAACGTTAGCA | | | |
| | CAAACGTAAGT | | | |
| CD8 stalk | CCCGCCCCAAGACCCCCC | 1322 | PAPRPPTPAPTIASQPLSLRPEAC | 1323 |
| | ACACCTGCGCCGACCATT | | RPAAGGAVHTRGLDFACD | |
| | GCTTCTCAACCCCTGAGTT | | | |
| | TGAGACCCGAGGCCTGCC | | | |
| | GGCCAGCTGCCGGCGGG | | | |
| | GCCGTGCATACAAGAGGA | | | |
| | CTCGATTTCGCTTGCGAC | | | |
| CD8 | ATCTATATCTGGGCACCTC | 1324 | IYIWAPLAGTCGVLLLSLVITLYCN | 1325 |
| transmembrane | TCGCTGGCACCTGTGGAG | | HRNRRRVCKCPR | |
| | TCCTTCTGCTCAGCCTGGT | | | |
| | TATTACTCTGTACTGTAAT | | | |
| | CACCGGAATCGCCGCCGC | | | |
| | GTTTGTAAGTGTCCCAGG | | | |
| Linker | GTCGAC | 1326 | VD | 1327 |
| CD3ζ | AGAGTGAAGTTCAGCAGG | 1328 | RVKFSRSADAPAYQQGQNQLYNE | 1329 |
| | AGCGCAGACGCCCCCGCG | | LNLGRREEYDVLDKRRGRDPEMG | |
| | TACCAGCAGGGCCAGAAC | | GKPRRKNPQEGLYNELQKDKMAE | |
| | CAGCTCTATAACGAGCTCA | | AYSEIGMKGERRRGKGHDGLYQG | |
| | ATCTAGGACGAAGAGAGG | | LSTATKDTYDALHMQALPPR | |
| | AGTACGATGTTTTGGACAA | | | |
| | GAGACGTGGCCGGGACCC | | | |
| | TGAGATGGGGGGAAAGCC | | | |
| | GAGAAGGAAGAACCCTCA | | | |
| | GGAAGGCCTGTACAATGA | | | |
| | ACTGCAGAAAGATAAGATG | | | |
| | GCGGAGGCCTACAGTGAG | | | |
| | ATTGGGATGAAAGGCGAG | | | |
| | CGCCGGAGGGGCAAGGG | | | |
| | GCACGATGGCCTTTACCA | | | |
| | GGGTCTCAGTACAGCCAC | | | |
| | CAAGGACACCTACGACGC | | | |
| | CCTTCACATGCAAGCTCTT | | | |
| | CCACCTCGT | | | |
| Linker | gGAACGCGTGGATCGGGA | 1330 | GTRGSG | 1331 |
| P2A | GCTACTAACTTCAGCCTGC | 1332 | ATNFSLLKQAGDVEENPGP | 1333 |
| | TGAAGCAGGCTGGAGACG | | | |
| | TGGAGGAGAACcccgggcct | | | |
| MyD88 | atggctgcaggaggtcccggcgcggg | 1334 | MAAGGPGAGSAAPVSSTSSLPLA | 1335 |
| | gtctgcggccccggtctcctccacatcc | | ALNMRVRRRLSLFLNVRTQVAAD | |
| | tcccttcccctggctgctctcaacatgcg | | WTALAEEMDFEYLEIRQLETQADP | |
| | agtgcggcgccgcctgtctctgttcttga | | TGRLLDAWQGRPGASVGRLLDLL | |
| | acgtgcggacacaggtggcggccga | | TKLGRDDVLLELGPSIEEDCQKYIL | |
| | ctggaccgcgctggcggaggagatg | | KQQQEEAEKPLQVAAVDSSVPRT | |
| | gactttgagtacttggagatccggcaa | | AELAGITTLDDPLGHMPERFDAFIC | |
| | ctggagacacaagcggaccccactg | | YCPSDI | |
| | gcaggctgctggacgcctggcaggga | | | |
| | cgccctggcgcctctgtaggccgactg | | | |
| | ctcgatctgcttaccaagctgggccgc | | | |
| | gacgacgtgctgctggagctgggacc | | | |
| | cagcattgaggaggattgccaaaagt | | | |
| | atatcttgaagcagcagcaggaggag | | | |
| | gctgagaagcctttacaggtggccgct | | | |
| | gtagacagcagtgtcccacggacagc | | | |
| | agagctggcgggcatcaccacacttg | | | |
| | atgaccccctggggcatatgcctgagc | | | |
| | gtttcgatgccttcatctgctattgcccca | | | |
| | gcgacatc | | | |
| Linker | gtcgag | 1336 | VE | 1337 |
| CD40 | aaaaaggtggccaagaagccaacc | 1338 | KKVAKKPTNKAPHPKQEPQEINFP | 1339 |
| | aataaggccccccaccccaagcagg | | DDLPGSNTAAPVQETLHGCQPVT | |
| | agccccaggagatcaattttcccgacg | | QEDGKESRISVQERQ | |
| | atcttcctggctccaacactgctgctcca | | | |
| | gtgcaggagactttacatggatgccaa | | | |
| | ccggtcacccaggaggatggcaaag | | | |
| | agagtcgcatctcagtgcaggagaga | | | |
| | cag | | | |
| Linker | gtcgag | 1340 | VE | 1341 |
| FKBPᵥ′ | GGcGTcCAaGTcGAaACcATt | 1342 | GVQVETISPGDGRTFPKRGQTCV | 1343 |
| | agtCCcGGcGAtGGcaGaACa | | VHYTGMLEDGKKVDSSRDRNKPF | |
| | TTtCCtAAaaGgGGaCAaACa | | KFMLGKQEVIRGWEEGVAQMSV | |
| | TGtGTcGTcCAtTAtACaGGc | | GQRAKLTISPDYAYGATGHPGIIPP | |
| | ATGtTgGAgGAcGGcAAaAA | | HATLVFDVELLKLE | |
| | gGTgGAcagtagtaGaGAtcGc | | | |
| | AAtAAaCCtTTcAAaTTcATGt | | | |
| | TgGGaAAaCAaGAaGTcATta | | | |
| | GgGGaTGGGAgGAgGGcGT | | | |
| | gGCtCAaATGtccGTcGGcCA | | | |
| | acGcGCtAAgCTcACcATcagc | | | |
| | CCcGAcTAcGCaTAcGGcGC | | | |
| | tACcGGaCAtCCcGGaATtATt | | | |
| | CCcCCtCAcGCtACctTgGTgT | | | |
| | TtGAcGTcGAaCTgtTgAAgC | | | |
| | TcGAa | | | |
| Linker | gtcgag | 1344 | VE | 1345 |
| FKBP wt | ggagtgcaggtggagactatctcccca | 1346 | GVQVETISPGDGRTFPKRGQTCV | 1347 |
| | ggagacgggcgcaccttccccaagc | | VHYTGMLEDGKKFDSSRDRNKPF | |
| | gcggccagacctgcgtggtgcactac | | KFMLGKQEVIRGWEEGVAQMSV | |
| | accgggatgcttgaagatggaaagaa | | GQRAKLTISPDYAYGATGHPGIIPP | |
| | aTttgattcctcccgggacagaaaca | | HATLVFDVELLKLE | |
| | agcctttaagtttatgctaggcaagca | | | |
| | ggaggtgatccgaggctgggaagaa | | | |
| | ggggttgcccagatgagtgtgggtcag | | | |
| | agagccaaactgactatatctccagatt | | | |
| | atgcctatggtgccactgggcacccag | | | |
| | gcatcatcccaccacatgccactctcgt | | | |
| | cttcgatgtggagcttctaaaactggaa | | | |
| STOP | TGA | 1348 | stop | |

APPENDIX 10
pBP1151--pSFG--MC-T2A-αCD19.Q.CD8stm.ζ

| | | SEQ | | SEQ ID |
|---|---|---|---|---|
| Fragment | Nucleotide | ID NO: | Peptide | NO: |
| MyD88 | ATGGCTGCAGGAGGTCCCGGCGCGGGGTCTGC | 1349 | MAAGGPGAGSAAPVSSTSSLPLAALNMRVRRRL | 1350 |
| | GGCCCCGGTCTCCTCCACATCCTCCCTTCCCCTG | | SLFLNVRTQVAADWTALAEEMDFEYLEIRQLETQ | |
| | GCTGCTCTCAACATGCGAGTGCGGCGCCGCCT | | ADPTGRLLDAWQGRPGASVGRLLDLLTKLGRDD | |
| | GTCTCTGTTCTTGAACGTGCGGACACAGGTGG | | VLLELGPSIEEDCQKYILKQQQEEAEKPLQVAAVD | |
| | CGGCCGACTGGACCGCGCTGGCGGAGGAGAT | | SSVPRTAELAGITTLDDPLGHMPERFDAFICYCPS | |
| | GGACTTTGAGTACTTGGAGATCCGGCAACTGG | | DI | |
| | AGACACAAGCGGACCCCACTGGCAGGCTGCTG | | | |
| | GACGCCTGGCAGGGACGCCCTGGCGCCTCTGT | | | |
| | AGGCCGACTGCTCGATCTGCTTACCAAGCTGG | | | |
| | GCCGCGACGACGTGCTGCTGGAGCTGGGACCC | | | |
| | AGCATTGAGGAGGATTGCCAAAAGTATATCTT | | | |
| | GAAGCAGCAGCAGGAGGAGGCTGAGAAGCCT | | | |
| | TTACAGGTGGCCGCTGTAGACAGCAGTGTCCC | | | |
| | ACGGACAGCAGAGCTGGCGGGCATCACCACAC | | | |
| | TTGATGACCCCCTGGGGCATATGCCTGAGCGTT | | | |
| | TCGATGCCTTCATCTGCTATTGCCCCAGCGACA | | | |
| | TC | | | |
| Linker | GTCGAG | 1351 | VE | 1352 |
| CD40 | AAAAAGGTGGCCAAGAAGCCAACCAATAAGGC | 1353 | KKVAKKPTNKAPHPKQEPQEINFPDDLPGSNTAA | 1354 |
| | CCCCCACCCCAAGCAGGAGCCCCAGGAGATCA | | PVQETLHGCQPVTQEDGKESRISVQERQ | |
| | ATTTTCCCGACGATCTTCCTGGCTCCAACACTGC | | | |
| | TGCTCCAGTGCAGGAGACTTTACATGGATGCC | | | |
| | AACCGGTCACCCAGGAGGATGGCAAAGAGAG | | | |
| | TCGCATCTCAGTGCAGGAGAGACAG | | | |
| Linker | GGATCTGGACCGCGG | 1355 | GSGPR | 1356 |
| T2A | GAAGGCCGAGGGAGCCTGCTGACATGTGGCG | 1357 | EGRGSLLTCGDVEENPGP | 1358 |
| | ATGTGGAGGAAAACCCAGGACCA | | | |
| Linker | CCACGG | 1359 | PR | 1360 |
| Signal Peptide | ATGGAGTTTGGACTTTCTTGGTTGTTTTTGGTG | 1361 | MEFGLSWLFLVAILKGVQCSR | 1362 |
| | GCAATTCTGAAGGGTGTCCAGTGTAGCAGG | | | |
| FMC63 VL | GACATCCAGATGACACAGACTACATCCTCCCTG | 1363 | DIQMTQTTSSLSASLGDRVTISCRASQDISKYLNW | 1364 |
| | TCTGCCTCTCTGGGAGACAGAGTCACCATCAGT | | YQQKPDGTVKLLIYHTSRLHSGVPSRFSGSGSGTD | |
| | TGCAGGGCAAGTCAGGACATTAGTAAATATTT | | YSLTISNLEQEDIATYFCQQGNTLPYTFGGGTKLEIT | |
| | AAATTGGTATCAGCAGAAACCAGATGGAACTG | | | |
| | TTAAACTCCTGATCTACCATACATCAAGATTAC | | | |
| | ACTCAGGAGTCCCATCAAGGTTCAGTGGCAGT | | | |
| | GGGTCTGGAACAGATTATTCTCTCACCATTAGC | | | |
| | AACCTGGAGCAAGAAGATATTGCCACTTACTTT | | | |
| | TGCCAACAGGGTAATACGCTTCCGTACACGTTC | | | |
| | GGAGGGGGGACTAAGTTGGAAATAACA | | | |
| Flex | GGCGGAGGAAGCGGAGGTGGGGGC | 1365 | GGGSGGGG | 1366 |
| FMC63 VH | GAGGTGAAACTGCAGGAGTCAGGACCTGGCCT | 1367 | EVKLQESGPGLVAPSQSLSVTCTVSGVSLPDYGVS | 1368 |
| | GGTGGCGCCCTCACAGAGCCTGTCCGTCACAT | | WIRQPPRKGLEWLGVIWGSETTYYNSALKSRLTII | |
| | GCACTGTCTCAGGGGTCTCATTACCCGACTATG | | KDNSKSQVFLKMNSLQTDDTAIYYCAKHYYYGGS | |
| | GTGTAAGCTGGATTCGCCAGCCTCCACGAAAG | | YAMDYWGQGTGVTVSS | |
| | GGTCTGGAGTGGCTGGGAGTAATATGGGGTA | | | |
| | GTGAAACCACATACTATAATTCAGCTCTCAAAT | | | |
| | CCAGACTGACCATCATCAAGGACAACTCCAAG | | | |
| | AGCCAAGTTTTCTTAAAAATGAACAGTCTGCAA | | | |
| | ACTGATGACACAGCCATTTACTACTGTGCCAAA | | | |
| | CATTATTACTACGGTGGTAGCTATGCTATGGAC | | | |
| | TACTGGGGTCAAGGAACCTCAGTCACCGTCTCC | | | |
| | TCA | | | |
| Linker | GGATCC | 1369 | GS | 1370 |
| CD34 epitope | GAACTTCCTACTCAGGGGACTTTCTCAAACGTT | 1371 | ELPTQGTFSNVSTNVS | 1372 |
| | AGCACAAACGTAAGT | | | |
| CD8 stalk | CCCGCCCCAAGACCCCCCACACCTGCGCCGACC | 1373 | PAPRPPTPAPTIASQPLSLRPEACRPAAGGAVHT | 1374 |
| | ATTGCTTCTCAACCCCTGAGTTTGAGACCCGAG | | RGLDFACD | |
| | GCCTGCCGGCCAGCTGCCGGCGGGGCCGTGCA | | | |
| | TACAAGAGGACTCGATTTCGCTTGCGAC | | | |
| CD8 | ATCTATATCTGGGCACCTCTCGCTGGCACCTGT | 1375 | IYIWAPLAGTCGVLLLSLVITLYCNHRNRRRVCKC | 1376 |
| transmembrane | GGAGTCCTTCTGCTCAGCCTGGTTATTACTCTG | | PR | |
| | TACTGTAATCACCGGAATCGCCGCCGCGTTTGT | | | |
| | AAGTGTCCCAGG | | | |
| Linker | GTCGAC | 1377 | VD | 1378 |
| CD3ζ | AGAGTGAAGTTCAGCAGGAGCGCAGACGCCCC | 1379 | RVKFSRSADAPAYQQGQNQLYNELNLGRREEYD | 1380 |
| | CGCGTACCAGCAGGGCCAGAACCAGCTCTATA | | VLDKRRGRDPEMGGKPRRKNPQEGLYNELQKD | |
| | ACGAGCTCAATCTAGGACGAAGAGAGGAGTAC | | KMAEAYSEIGMKGERRRGKGHDGLYQGLSTATK | |
| | GATGTTTTGGACAAGAGACGTGGCCGGGACCC | | DTYDALHMQALPPR | |
| | TGAGATGGGGGGAAAGCCGAGAAGGAAGAAC | | | |
| | CCTCAGGAAGGCCTGTACAATGAACTGCAGAA | | | |
| | AGATAAGATGGCGGAGGCCTACAGTGAGATTG | | | |
| | GGATGAAAGGCGAGCGCCGGAGGGGCAAGG | | | |
| | GGCACGATGGCCTTTACCAGGGTCTCAGTACA | | | |
| | GCCACCAAGGACACCTACGACGCCCTTCACATG | | | |
| | CAAGCTCTTCCACCTCGT | | | |

APPENDIX 11
pBP1152--pSFG--MC-T2A-αCD19.Q.CD8stm.ζ

| | | SEQ ID | | SEQ ID |
|---|---|---|---|---|
| Fragment | Nucleotide | NO: | Peptide | NO: |
| Myristoylation | ATGGGGAGTAGCAAGAGCAAGCCTAAGGACC | 1381 | MGSSKSKPKDPSQR | 1382 |
| Targeting | CCAGCCAGCGC | | | |
| sequence | | | | |
| MyD88 | ATGGCTGCAGGAGGTCCCGGCGCGGGGTCTGC | 1383 | MAAGGPGAGSAAPVSSTSSLPLAALNMRVRRRL | 1384 |
| | GGCCCCGGTCTCCTCCACATCCTCCCTTCCCCTG | | SLFLNVRTQVAADWTALAEEMDFEYLEIRQLETQ | |
| | GCTGCTCTCAACATGCGAGTGCGGCGCCGCCT | | ADPTGRLLDAWQGRPGASVGRLLDLLTKLGRDD | |
| | GTCTCTGTTCTTGAACGTGCGGACACAGGTGG | | VLLELGPSIEEDCQKYILKQQQEEAEKPLQVAAVD | |
| | CGGCCGACTGGACCGCGCTGGCGGAGGAGAT | | SSVPRTAELAGITTLDDPLGHMPERFDAFICYCPS | |
| | GGACTTTGAGTACTTGGAGATCCGGCAACTGG | | DI | |
| | AGACACAAGCGGACCCCACTGGCAGGCTGCTG | | | |
| | GACGCCTGGCAGGGACGCCCTGGCGCCTCTGT | | | |
| | AGGCCGACTGCTCGATCTGCTTACCAAGCTGG | | | |
| | GCCGCGACGACGTGCTGCTGGAGCTGGGACCC | | | |
| | AGCATTGAGGAGGATTGCCAAAAGTATATCTT | | | |
| | GAAGCAGCAGCAGGAGGAGGCTGAGAAGCCT | | | |
| | TTACAGGTGGCCGCTGTAGACAGCAGTGTCCC | | | |
| | ACGGACAGCAGAGCTGGCGGGCATCACCACAC | | | |
| | TTGATGACCCCCTGGGGCATATGCCTGAGCGTT | | | |
| | TCGATGCCTTCATCTGCTATTGCCCCAGCGACA | | | |
| | TC | | | |
| Linker | GTCGAG | 1385 | VE | 1386 |
| CD40 | AAAAAGGTGGCCAAGAAGCCAACCAATAAGGC | 1387 | KKVAKKPTNKAPHPKQEPQEINFPDDLPGSNTAA | 1388 |
| | CCCCCACCCCAAGCAGGAGCCCCAGGAGATCA | | PVQETLHGCQPVTQEDGKESRISVQERQ | |
| | ATTTTCCCGACGATCTTCCTGGCTCCAACACTGC | | | |
| | TGCTCCAGTGCAGGAGACTTTACATGGATGCC | | | |
| | AACCGGTCACCCAGGAGGATGGCAAAGAGAG | | | |
| | TCGCATCTCAGTGCAGGAGAGACAG | | | |
| Linker | GGATCTGGACCGCGG | 1389 | GSGPR | 1390 |
| T2A | GAAGGCCGAGGGAGCCTGCTGACATGTGGCG | 1391 | EGRGSLLTCGDVEENPGP | 1392 |
| | ATGTGGAGGAAAACCCAGGACCA | | | |
| Linker | CCACGG | 1393 | PR | 1394 |
| Signal Peptide | ATGGAGTTTGGACTTTCTTGGTTGTTTTTGGTG | 1395 | MEFGLSWLFLVAILKGVQCSR | 1396 |
| | GCAATTCTGAAGGGTGTCCAGTGTAGCAGG | | | |
| FMC63 VL | GACATCCAGATGACACAGACTACATCCTCCCTG | 1397 | DIQMTQTTSSLSASLGDRVTISCRASQDISKYLNW | 1398 |
| | TCTGCCTCTCTGGGAGACAGAGTCACCATCAGT | | YQQKPDGTVKLLIYHTSRLHSGVPSRFSGSGSGTD | |
| | TGCAGGGCAAGTCAGGACATTAGTAAATATTT | | YSLTISNLEQEDIATYFCQQGNTLPYTFGGGTKLEIT | |
| | AAATTGGTATCAGCAGAAACCAGATGGAACTG | | | |
| | TTAAACTCCTGATCTACCATACATCAAGATTAC | | | |
| | ACTCAGGAGTCCCATCAAGGTTCAGTGGCAGT | | | |
| | GGGTCTGGAACAGATTATTCTCTCACCATTAGC | | | |
| | AACCTGGAGCAAGAAGATATTGCCACTTACTTT | | | |
| | TGCCAACAGGGTAATACGCTTCCGTACACGTTC | | | |
| | GGAGGGGGGACTAAGTTGGAAATAACA | | | |
| Flex | GGCGGAGGAAGCGGAGGTGGGGGC | 1399 | GGGSGGGG | 1400 |
| FMC63 VH | GAGGTGAAACTGCAGGAGTCAGGACCTGGCCT | 1401 | EVKLQESGPGLVAPSQSLSVTCTVSGVSLPDYGVS | 1402 |
| | GGTGGCGCCCTCACAGAGCCTGTCCGTCACAT | | WIRQPPRKGLEWLGVIWGSETTYYNSALKSRLTII | |
| | GCACTGTCTCAGGGGTCTCATTACCCGACTATG | | KDNSKSQVFLKMNSLQTDDTAIYYCAKHYYYGGS | |
| | GTGTAAGCTGGATTCGCCAGCCTCCACGAAAG | | YAMDYWGQGTSVTVSS | |
| | GGTCTGGAGTGGCTGGGAGTAATATGGGGTA | | | |
| | GTGAAACCACATACTATAATTCAGCTCTCAAAT | | | |
| | CCAGACTGACCATCATCAAGGACAACTCCAAG | | | |
| | AGCCAAGTTTTCTTAAAAATGAACAGTCTGCAA | | | |
| | ACTGATGACACAGCCATTTACTACTGTGCCAAA | | | |
| | CATTATTACTACGGTGGTAGCTATGCTATGGAC | | | |
| | TACTGGGGTCAAGGAACCTCAGTCACCGTCTCC | | | |
| | TCA | | | |
| Linker | GGATCC | 1403 | GS | 1404 |
| CD34 epitope | GAACTTCCTACTCAGGGGACTTTCTCAAACGTT | 1405 | ELPTQGTFSNVSTNVS | 1406 |
| | AGCACAAACGTAAGT | | | |
| CD8 stalk | CCCGCCCCAAGACCCCCCACACCTGCGCCGACC | 1407 | PAPRPPTPAPTIASQPLSLRPEACRPAAGGAVHT | 1408 |
| | ATTGCTTCTCAACCCCTGAGTTTGAGACCCGAG | | RGLDFACD | |
| | GCCTGCCGGCCAGCTGCCGGCGGGGCCGTGCA | | | |
| | TACAAGAGGACTCGATTTCGCTTGCGAC | | | |
| CD8 | ATCTATATCTGGGCACCTCTCGCTGGCACCTGT | 1409 | IYIWAPLAGTCGVLLLSLVITLYCNHRNRRRVCKCPR | 1410 |
| transmembrane | GGAGTCCTTCTGCTCAGCCTGGTTATTACTCTG | | | |
| | TACTGTAATCACCGGAATCGCCGCCGCGTTTGT | | | |
| | AAGTGTCCCAGG | | | |
| Linker | GTCGAC | 1411 | VD | 1412 |
| CD3ζ | AGAGTGAAGTTCAGCAGGAGCGCAGACGCCCC | 1413 | RVKFSRSADAPAYQQGQNQLYNELNLGRREEYD | 1414 |
| | CGCGTACCAGCAGGGCCAGAACCAGCTCTATA | | VLDKRRGRDPEMGGKPRRKNPQEGLYNELQKD | |
| | ACGAGCTCAATCTAGGACGAAGAGAGGAGTAC | | KMAEAYSEIGMKGERRRGKGHDGLYQGLSTATK | |
| | GATGTTTTGGACAAGAGACGTGGCCGGGACCC | | DTYDALHMQALPPR | |
| | TGAGATGGGGGGAAAGCCGAGAAGGAAGAAC | | | |
| | CCTCAGGAAGGCCTGTACAATGAACTGCAGAA | | | |
| | AGATAAGATGGCGGAGGCCTACAGTGAGATTG | | | |
| | GGATGAAAGGCGAGCGCCGGAGGGGCAAGG | | | |
| | GGCACGATGGCCTTTACCAGGGTCTCAGTACA | | | |
| | GCCACCAAGGACACCTACGACGCCCTTCACATG | | | |
| | CAAGCTCTTCCACCTCGT | | | |

APPENDIX 12
pBP1414--pSFG-αCD19.Q.CD8stm.ζ-P2A-MC

| | | SEQ ID | | SEQ ID |
|---|---|---|---|---|
| Fragment | Nucleotide | NO: | Peptide | NO: |
| Signal Peptide | ATGGAGTTTGGACTTTCTTGGTTGTTTTTGGTG | 1415 | MEFGLSWLFLVAILKGVQCSR | 1416 |
| | GCAATTCTGAAGGGTGTCCAGTGTAGCAGG | | | |
| FMC63 VL | GACATCCAGATGACACAGACTACATCCTCCCTG | 1417 | DIQMTQTTSSLSASLGDRVTISCRASQD | 1418 |
| | TCTGCCTCTCTGGGAGACAGAGTCACCATCAGT | | ISKYLNWYQQKPDGTVKLLIYHTSRLHS | |
| | TGCAGGGCAAGTCAGGACATTAGTAAATATTT | | GVPSRFSGSGSGTDYSLTISNLEQEDIAT | |
| | AAATTGGTATCAGCAGAAACCAGATGGAACTG | | YFCQQGNTLPYTFGGGTKLEIT | |
| | TTAAACTCCTGATCTACCATACATCAAGATTAC | | | |
| | ACTCAGGAGTCCCATCAAGGTTCAGTGGCAGT | | | |
| | GGGTCTGGAACAGATTATTCTCTCACCATTAGC | | | |
| | AACCTGGAGCAAGAAGATATTGCCACTTACTTT | | | |
| | TGCCAACAGGGTAATACGCTTCCGTACACGTTC | | | |
| | GGAGGGGGGACTAAGTTGGAAATAACA | | | |
| Flex | GGCGGAGGAAGCGGAGGTGGGGGC | 1419 | GGGSGGGG | 1420 |
| FMC63 VH | GAGGTGAAACTGCAGGAGTCAGGACCTGGCCT | 1421 | EVKLQESGPGLVAPSQSLSVTCTVSGVS | 1422 |
| | GGTGGCGCCCTCACAGAGCCTGTCCGTCACAT | | LPDYGVSWIRQPPRKGLEWLGVIWGSE | |
| | GCACTGTCTCAGGGGTCTCATTACCCGACTATG | | TTYYNSALKSRLTIIKDNSKSQVFLKMNS | |
| | GTGTAAGCTGGATTCGCCAGCCTCCACGAAAG | | LQTDDTAIYYCAKHYYYGGSYAMDYW | |
| | GGTCTGGAGTGGCTGGGAGTAATATGGGGTA | | GQGTSVTVSS | |
| | GTGAAACCACATACTATAATTCAGCTCTCAAAT | | | |
| | CCAGACTGACCATCATCAAGGACAACTCCAAG | | | |
| | AGCCAAGTTTTCTTAAAAATGAACAGTCTGCAA | | | |
| | ACTGATGACACAGCCATTTACTACTGTGCCAAA | | | |
| | CATTATTACTACGGTGGTAGCTATGCTATGGAC | | | |
| | TACTGGGGTCAAGGAACCTCAGTCACCGTCTCC | | | |
| | TCA | | | |
| Linker | GGATCC | 1423 | GS | 1424 |
| CD34 epitope | GAACTTCCTACTCAGGGGACTTTCTCAAACGTT | 1425 | ELPTQGTFSNVSTNVS | 1426 |
| | AGCACAAACGTAAGT | | | |
| CD8 stalk | CCCGCCCCAAGACCCCCCACACCTGCGCCGACC | 1427 | PAPRPPTPAPTIASQPLSLRPEACRPAA | 1428 |
| | ATTGCTTCTCAACCCCTGAGTTTGAGACCCGAG | | GGAVHTRGLDFACD | |
| | GCCTGCCGGCCAGCTGCCGGCGGGGCCGTGCA | | | |
| | TACAAGAGGACTCGATTTCGCTTGCGAC | | | |
| CD8 | ATCTATATCTGGGCACCTCTCGCTGGCACCTGT | 1429 | IYIWAPLAGTCGVLLLSLVITLYCNHRNR | 1430 |
| transmembrane | GGAGTCCTTCTGCTCAGCCTGGTTATTACTCTG | | RRVCKCPR | |
| | TACTGTAATCACCGGAATCGCCGCCGCGTTTGT | | | |
| | AAGTGTCCCAGG | | | |
| Linker | GTCGAC | 1431 | VD | 1432 |
| CD3ζ | AGAGTGAAGTTCAGCAGGAGCGCAGACGCCCC | 1433 | RVKFSRSADAPAYQQGQNQLYNELNL | 1434 |
| | CGCGTACCAGCAGGGCCAGAACCAGCTCTATA | | GRREEYDVLDKRRGRDPEMGGKPRRK | |
| | ACGAGCTCAATCTAGGACGAAGAGAGGAGTAC | | NPQEGLYNELQKDKMAEAYSEIGMKG | |
| | GATGTTTTGGACAAGAGACGTGGCCGGGACCC | | ERRRGKGHDGLYQGLSTATKDTYDALH | |
| | TGAGATGGGGGGAAAGCCGAGAAGGAAGAAC | | MQALPPR | |
| | CCTCAGGAAGGCCTGTACAATGAACTGCAGAA | | | |
| | AGATAAGATGGCGGAGGCCTACAGTGAGATTG | | | |
| | GGATGAAAGGCGAGCGCCGGAGGGGCAAGG | | | |
| | GGCACGATGGCCTTTACCAGGGTCTCAGTACA | | | |
| | GCCACCAAGGACACCTACGACGCCCTTCACATG | | | |
| | CAAGCTCTTCCACCTCGT | | | |
| P2A | GCTACTAACTTCAGCCTGCTGAAGCAGGCTGG | 1435 | ATNFSLLKQAGDVEENPGP | 1436 |
| | AGACGTGGAGGAGAACCCCGGGCCT | | | |
| MyD88 | ATGGCTGCAGGAGGTCCCGGCGCGGGGTCTGC | 1437 | MAAGGPGAGSAAPVSSTSSLPLAALN | 1438 |
| | GGCCCCGGTCTCCTCCACATCCTCCCTTCCCCTG | | MRVRRRLSLFLNVRTQVAADWTALAEE | |
| | GCTGCTCTCAACATGCGAGTGCGGCGCCGCCT | | MDFEYLEIRQLETQADPTGRLLDAWQG | |
| | GTCTCTGTTCTTGAACGTGCGGACACAGGTGG | | RPGASVGRLLDLLTKLGRDDVLLELGPSI | |
| | CGGCCGACTGGACCGCGCTGGCGGAGGAGAT | | EEDCQKYILKQQQEEAEKPLQVAAVDS | |
| | GGACTTTGAGTACTTGGAGATCCGGCAACTGG | | SVPRTAELAGITTLDDPLGHMPERFDAF | |
| | AGACACAAGCGGACCCCACTGGCAGGCTGCTG | | ICYCPSDI | |
| | GACGCCTGGCAGGGACGCCCTGGCGCCTCTGT | | | |
| | AGGCCGACTGCTCGATCTGCTTACCAAGCTGG | | | |
| | GCCGCGACGACGTGCTGCTGGAGCTGGGACCC | | | |
| | AGCATTGAGGAGGATTGCCAAAAGTATATCTT | | | |
| | GAAGCAGCAGCAGGAGGAGGCTGAGAAGCCT | | | |
| | TTACAGGTGGCCGCTGTAGACAGCAGTGTCCC | | | |
| | ACGGACAGCAGAGCTGGCGGGCATCACCACAC | | | |
| | TTGATGACCCCCTGGGGCATATGCCTGAGCGTT | | | |
| | TCGATGCCTTCATCTGCTATTGCCCCAGCGACA | | | |
| | TC | | | |
| Linker | GTCGAG | 1439 | VE | 1440 |
| CD40 | AAAAAGGTGGCCAAGAAGCCAACCAATAAGGC | 1441 | KKVAKKPTNKAPHPKQEPQEINFPDDL | 1442 |
| | CCCCCACCCCAAGCAGGAGCCCCAGGAGATCA | | PGSNTAAPVQETLHGCQPVTQEDGKES | |
| | ATTTTCCCGACGATCTTCCTGGCTCCAACACTGC | | RISVQERQ | |
| | TGCTCCAGTGCAGGAGACTTTACATGGATGCC | | | |
| | AACCGGTCACCCAGGAGGATGGCAAAGAGAG | | | |
| | TCGCATCTCAGTGCAGGAGAGACAG | | | |

APPENDIX 13
pBP1414--pSFG-αCD19.Q.CD8stm.ζ-P2A-MC

| | | SEQ ID | | SEQ ID |
|---|---|---|---|---|
| Fragment | Nucleotide | NO: | Peptide | NO: |
| Signal Peptide | ATGGAGTTTGGACTTTCTTGGTTGTTTTTGGTG | 1443 | MEFGLSWLFLVAILKGVQCSR | 1444 |
| | GCAATTCTGAAGGGTGTCCAGTGTAGCAGG | | | |
| FMC63 VL | GACATCCAGATGACACAGACTACATCCTCCCTG | 1445 | DIQMTQTTSSLSASLGDRVTISCRASQDISKYLNW | 1446 |
| | TCTGCCTCTCTGGGAGACAGAGTCACCATCAGT | | YQQKPDGTVKLLIYHTSRLHSGVPSRFSGSGSGTD | |
| | TGCAGGGCAAGTCAGGACATTAGTAAATATTT | | YSLTISNLEQEDIATYFCQQGNTLPYTFGGGTKLEIT | |
| | AAATTGGTATCAGCAGAAACCAGATGGAACTG | | | |
| | TTAAACTCCTGATCTACCATACATCAAGATTAC | | | |
| | ACTCAGGAGTCCCATCAAGGTTCAGTGGCAGT | | | |
| | GGGTCTGGAACAGATTATTCTCTCACCATTAGC | | | |
| | AACCTGGAGCAAGAAGATATTGCCACTTACTTT | | | |
| | TGCCAACAGGGTAATACGCTTCCGTACACGTTC | | | |
| | GGAGGGGGGACTAAGTTGGAAATAACA | | | |
| Flex | GGCGGAGGAAGCGGAGGTGGGGGC | 1447 | GGGSGGGG | 1448 |
| FMC63 VH | GAGGTGAAACTGCAGGAGTCAGGACCTGGCCT | 1449 | EVKLQESGPGLVAPSQSLSVTCTVSGVSLPDYGVS | 1450 |
| | GGTGGCGCCCTCACAGAGCCTGTCCGTCACAT | | WIRQPPRKGLEWLGVIWGSETTYYNSALKSRLTII | |
| | GCACTGTCTCAGGGGTCTCATTACCCGACTATG | | KDNSKSQVFLKMNSLQTDDTAIYYCAKHYYYGGS | |
| | GTGTAAGCTGGATTCGCCAGCCTCCACGAAAG | | YAMDYWGQGTSVTVSS | |
| | GGTCTGGAGTGGCTGGGAGTAATATGGGGTA | | | |
| | GTGAAACCACATACTATAATTCAGCTCTCAAAT | | | |
| | CCAGACTGACCATCATCAAGGACAACTCCAAG | | | |
| | AGCCAAGTTTTCTTAAAAATGAACAGTCTGCAA | | | |
| | ACTGATGACACAGCCATTTACTACTGTGCCAAA | | | |
| | CATTATTACTACGGTGGTAGCTATGCTATGGAC | | | |
| | TACTGGGGTCAAGGAACCTCAGTCACCGTCTCC | | | |
| | TCA | | | |
| Linker | GGATCC | 1451 | GS | 1452 |
| CD34 epitope | GAACTTCCTACTCAGGGGACTTTCTCAAACGTT | 1453 | ELPTQGTFSNVSTNVS | 1454 |
| | AGCACAAACGTAAGT | | | |
| CD8 stalk | CCCGCCCCAAGACCCCCCACACCTGCGCCGACC | 1455 | PAPRPPTPAPTIASQPLSLRPEACRPAAGGAVHT | 1456 |
| | ATTGCTTCTCAACCCCTGAGTTTGAGACCCGAG | | RGLDFACD | |
| | GCCTGCCGGCCAGCTGCCGGCGGGGCCGTGCA | | | |
| | TACAAGAGGACTCGATTTCGCTTGCGAC | | | |
| CD8 | ATCTATATCTGGGCACCTCTCGCTGGCACCTGT | 1457 | IYIWAPLAGTCGVLLLSLVITLYCNHRNRRRVCKC | 1458 |
| transmembrane | GGAGTCCTTCTGCTCAGCCTGGTTATTACTCTG | | PR | |
| | TACTGTAATCACCGGAATCGCCGCCGCGTTTGT | | | |
| | AAGTGTCCCAGG | | | |
| Linker | GTCGAC | 1459 | VD | 1460 |
| CD3ζ | AGAGTGAAGTTCAGCAGGAGCGCAGACGCCCC | 1461 | RVKFSRSADAPAYQQGQNQLYNELNLGRREEYD | 1462 |
| | CGCGTACCAGCAGGGCCAGAACCAGCTCTATA | | VLDKRRGRDPEMGGKPRRKNPQEGLYNELQKD | |
| | ACGAGCTCAATCTAGGACGAAGAGAGGAGTAC | | KMAEAYSEIGMKGERRRGKGHDGLYQGLSTATK | |
| | GATGTTTTGGACAAGAGACGTGGCCGGGACCC | | DTYDALHMQALPPR | |
| | TGAGATGGGGGGAAAGCCGAGAAGGAAGAAC | | | |
| | CCTCAGGAAGGCCTGTACAATGAACTGCAGAA | | | |
| | AGATAAGATGGCGGAGGCCTACAGTGAGATTG | | | |
| | GGATGAAAGGCGAGCGCCGGAGGGGCAAGG | | | |
| | GGCACGATGGCCTTTACCAGGGTCTCAGTACA | | | |
| | GCCACCAAGGACACCTACGACGCCCTTCACATG | | | |
| | CAAGCTCTTCCACCTCGT | | | |
| P2A | GCTACTAACTTCAGCCTGCTGAAGCAGGCTGG | 1463 | ATNFSLLKQAGDVEENPGP | 1464 |
| | AGACGTGGAGGAGAACCCCGGGCCT | | | |
| MyD88 | ATGGCTGCAGGAGGTCCCGGCGCGGGGTCTGC | 1465 | MAAGGPGAGSAAPVSSTSSLPLAALNMRVRRRL | 1466 |
| | GGCCCCGGTCTCCTCCACATCCTCCCTTCCCCTG | | SLFLNVRTQVAADWTALAEEMDFEYLEIRQLETQ | |
| | GCTGCTCTCAACATGCGAGTGCGGCGCCGCCT | | ADPTGRLLDAWQGRPGASVGRLLDLLTKLGRDD | |
| | GTCTCTGTTCTTGAACGTGCGGACACAGGTGG | | VLLELGPSIEEDCQKYILKQQQEEAEKPLQVAAVD | |
| | CGGCCGACTGGACCGCGCTGGCGGAGGAGAT | | SSVPRTAELAGITTLDDPLGHMPERFDAFICYCPS | |
| | GGACTTTGAGTACTTGGAGATCCGGCAACTGG | | DI | |
| | AGACACAAGCGGACCCCACTGGCAGGCTGCTG | | | |
| | GACGCCTGGCAGGGACGCCCTGGCGCCTCTGT | | | |
| | AGGCCGACTGCTCGATCTGCTTACCAAGCTGG | | | |
| | GCCGCGACGACGTGCTGCTGGAGCTGGGACCC | | | |
| | AGCATTGAGGAGGATTGCCAAAAGTATATCTT | | | |
| | GAAGCAGCAGCAGGAGGAGGCTGAGAAGCCT | | | |
| | TTACAGGTGGCCGCTGTAGACAGCAGTGTCCC | | | |
| | ACGGACAGCAGAGCTGGCGGGCATCACCACAC | | | |
| | TTGATGACCCCCTGGGGCATATGCCTGAGCGTT | | | |
| | TCGATGCCTTCATCTGCTATTGCCCCAGCGACA | | | |
| | TC | | | |
| Linker | GTCGAG | 1467 | VE | 1468 |
| CD40 | AAAAAGGTGGCCAAGAAGCCAACCAATAAGGC | 1469 | KKVAKKPTNKAPHPKQEPQEINFPDDLPGSNTAA | 1470 |
| | CCCCCACCCCAAGCAGGAGCCCCAGGAGATCA | | PVQETLHGCQPVTQEDGKESRISVQERQ | |
| | ATTTTCCCGACGATCTTCCTGGCTCCAACACTGC | | | |
| | TGCTCCAGTGCAGGAGACTTTACATGGATGCC | | | |
| | AACCGGTCACCCAGGAGGATGGCAAAGAGAG | | | |
| | TCGCATCTCAGTGCAGGAGAGACAG | | | |

APPENDIX 14
pBP1433--pSFG-Fv-Fv-MC-T2A-αCD19.Q.CD8stm.ζ

| | | SEQ ID | | SEQ ID |
|---|---|---|---|---|
| Fragment | Nucleotide | NO: | Peptide | NO: |
| FKBP_{V}′ | GGCGTCCAAGTCGAAACCATTAGTCCCGGCGA | 1471 | GVQVETISPGDGRTFPKRGQTCVVHYTGMLEDG | 1472 |
| | TGGCAGAACATTTCCTAAAAGGGGACAAACAT | | KKVDSSRDRNKPFKFMLGKQEVIRGWEEGVAQ | |
| | GTGTCGTCCATTATACAGGCATGTTGGAGGAC | | MSVGQRAKLTISPDYAYGATGHPGIIPPHATLVF | |
| | GGCAAAAAGGTGGACAGTAGTAGAGATCGCA | | DVELLKLE | |
| | ATAAACCTTTCAAATTCATGTTGGGAAAACAAG | | | |
| | AAGTCATTAGGGGATGGGAGGAGGGCGTGGC | | | |
| | TCAAATGTCCGTCGGCCAACGCGCTAAGCTCAC | | | |
| | CATCAGCCCCGACTACGCATACGGCGCTACCG | | | |
| | GACATCCCGGAATTATTCCCCCTCACGCTACCTT | | | |
| | GGTGTTTGACGTCGAACTGTTGAAGCTCGAA | | | |
| Linker | GTCGAG | 1473 | VE | 1474 |
| FKBP_{V} | GGAGTGCAGGTGGAGACTATCTCCCCAGGAGA | 1475 | GVQVETISPGDGRTFPKRGQTCVVHYTGMLEDG | 1476 |
| | CGGGCGCACCTTCCCCAAGCGCGGCCAGACCT | | KKVDSSRDRNKPFKFMLGKQEVIRGWEEGVAQ | |
| | GCGTGGTGCACTACACCGGGATGCTTGAAGAT | | MSVGQRAKLTISPDYAYGATGHPGIIPPHATLVF | |
| | GGAAAGAAAGTTGATTCCTCCCGGGACAGAAA | | DVELLKLE | |
| | CAAGCCCTTTAAGTTTATGCTAGGCAAGCAGG | | | |
| | AGGTGATCCGAGGCTGGGAAGAAGGGGTTGC | | | |
| | CCAGATGAGTGTGGGTCAGAGAGCCAAACTGA | | | |
| | CTATATCTCCAGATTATGCCTATGGTGCCACTG | | | |
| | GGCACCCAGGCATCATCCCACCACATGCCACTC | | | |
| | TCGTCTTCGATGTGGAGCTTCTAAAACTGGAA | | | |
| MyD88 | ATGGCTGCAGGAGGTCCCGGCGCGGGGTCTGC | 1477 | MAAGGPGAGSAAPVSSTSSLPLAALNMRVRRRL | 1478 |
| | GGCCCCGGTCTCCTCCACATCCTCCCTTCCCCTG | | SLFLNVRTQVAADWTALAEEMDFEYLEIRQLETQ | |
| | GCTGCTCTCAACATGCGAGTGCGGCGCCGCCT | | ADPTGRLLDAWQGRPGASVGRLLDLLTKLGRDD | |
| | GTCTCTGTTCTTGAACGTGCGGACACAGGTGG | | VLLELGPSIEEDCQKYILKQQQEEAEKPLQVAAVD | |
| | CGGCCGACTGGACCGCGCTGGCGGAGGAGAT | | SSVPRTAELAGITTLDDPLGHMPERFDAFICYCPS | |
| | GGACTTTGAGTACTTGGAGATCCGGCAACTGG | | DI | |
| | AGACACAAGCGGACCCCACTGGCAGGCTGCTG | | | |
| | GACGCCTGGCAGGGACGCCCTGGCGCCTCTGT | | | |
| | AGGCCGACTGCTCGATCTGCTTACCAAGCTGG | | | |
| | GCCGCGACGACGTGCTGCTGGAGCTGGGACCC | | | |
| | AGCATTGAGGAGGATTGCCAAAAGTATATCTT | | | |
| | GAAGCAGCAGCAGGAGGAGGCTGAGAAGCCT | | | |
| | TTACAGGTGGCCGCTGTAGACAGCAGTGTCCC | | | |
| | ACGGACAGCAGAGCTGGCGGGCATCACCACAC | | | |
| | TTGATGACCCCCTGGGGCATATGCCTGAGCGTT | | | |
| | TCGATGCCTTCATCTGCTATTGCCCCAGCGACA | | | |
| | TC | | | |
| Linker | GTCGAG | 1479 | VE | 1480 |
| CD40 | AAAAAGGTGGCCAAGAAGCCAACCAATAAGGC | 1481 | KKVAKKPTNKAPHPKQEPQEINFPDDLPGSNTAA | 1482 |
| | CCCCCACCCCAAGCAGGAGCCCCAGGAGATCA | | PVQETLHGCQPVTQEDGKESRISVQERQ | |
| | ATTTTCCCGACGATCTTCCTGGCTCCAACACTGC | | | |
| | TGCTCCAGTGCAGGAGACTTTACATGGATGCC | | | |
| | AACCGGTCACCCAGGAGGATGGCAAAGAGAG | | | |
| | TCGCATCTCAGTGCAGGAGAGACAG | | | |
| Linker | GGATCTGGACCGCGG | 1483 | GSGPR | 1484 |
| T2A | GAAGGCCGAGGGAGCCTGCTGACATGTGGCG | 1485 | EGRGSLLTCGDVEENPGP | 1486 |
| | ATGTGGAGGAAAACCCAGGACCA | | | |
| Linker | CCACGG | 1487 | PR | 1488 |
| Signal Peptide | ATGGAGTTTGGACTTTCTTGGTTGTTTTTGGTG | 1489 | MEFGLSWLFLVAILKGVQCSR | 1490 |
| | GCAATTCTGAAGGGTGTCCAGTGTAGCAGG | | | |
| FMC63 VL | GACATCCAGATGACACAGACTACATCCTCCCTG | 1491 | DIQMTQTTSSLSASLGDRVTISCRASQDISKYLNW | 1492 |
| | TCTGCCTCTCTGGGAGACAGAGTCACCATCAGT | | YQQKPDGTVKLLIYHTSRLHSGVPSRFSGSGSGTD | |
| | TGCAGGGCAAGTCAGGACATTAGTAAATATTT | | YSLTISNLEQEDIATYFCQQGNTLPYTFGGGTKLEIT | |
| | AAATTGGTATCAGCAGAAACCAGATGGAACTG | | | |
| | TTAAACTCCTGATCTACCATACATCAAGATTAC | | | |
| | ACTCAGGAGTCCCATCAAGGTTCAGTGGCAGT | | | |
| | GGGTCTGGAACAGATTATTCTCTCACCATTAGC | | | |
| | AACCTGGAGCAAGAAGATATTGCCACTTACTTT | | | |
| | TGCCAACAGGGTAATACGCTTCCGTACACGTTC | | | |
| | GGAGGGGGGACTAAGTTGGAAATAACA | | | |
| Flex | GGCGGAGGAAGCGGAGGTGGGGGC | 1493 | GGGSGGGG | 1494 |
| FMC63 VH | GAGGTGAAACTGCAGGAGTCAGGACCTGGCCT | 1495 | EVKLQESGPGLVAPSQSLSVTCTVSGVSLPDYGVS | 1496 |
| | GGTGGCGCCCTCACAGAGCCTGTCCGTCACAT | | WIRQPPRKGLEWLGVIWGSETTYYNSALKSRLTII | |
| | GCACTGTCTCAGGGGTCTCATTACCCGACTATG | | KDNSKSQVFLKMNSLQTDDTAIYYCAKHYYYGGS | |
| | GTGTAAGCTGGATTCGCCAGCCTCCACGAAAG | | YAMDYWGQGTSVTVSS | |
| | GGTCTGGAGTGGCTGGGAGTAATATGGGGTA | | | |
| | GTGAAACCACATACTATAATTCAGCTCTCAAAT | | | |
| | CCAGACTGACCATCATCAAGGACAACTCCAAG | | | |
| | AGCCAAGTTTTCTTAAAAATGAACAGTCTGCAA | | | |
| | ACTGATGACACAGCCATTTACTACTGTGCCAAA | | | |
| | CATTATTACTACGGTGGTAGCTATGCTATGGAC | | | |
| | TACTGGGGTCAAGGAACCTCAGTCACCGTCTCC | | | |
| | TCA | | | |
| Linker | GGATCC | 1497 | GS | 1498 |
| CD34 epitope | GAACTTCCTACTCAGGGGACTTTCTCAAACGTT | 1499 | ELPTQGTFSNVSTNVS | 1500 |
| | AGCACAAACGTAAGT | | | |
| CD8 stalk | CCCGCCCCAAGACCCCCCACACCTGCGCCGACC | 1501 | PAPRPPTPAPTIASQPLSLRPEACRPAAGGAVHT | 1502 |
| | ATTGCTTCTCAACCCCTGAGTTTGAGACCCGAG | | RGLDFACD | |
| | GCCTGCCGGCCAGCTGCCGGCGGGGCCGTGCA | | | |
| | TACAAGAGGACTCGATTTCGCTTGCGAC | | | |
| CD8 | ATCTATATCTGGGCACCTCTCGCTGGCACCTGT | 1503 | IYIWAPLAGTCGVLLLSLVITLYCNHRNRRRVCKC | 1504 |
| transmembrane | GGAGTCCTTCTGCTCAGCCTGGTTATTACTCTG | | PR | |
| | TACTGTAATCACCGGAATCGCCGCCGCGTTTGT | | | |
| | AAGTGTCCCAGG | | | |
| Linker | GTCGAC | 1505 | VD | 1506 |
| CD3ζ | AGAGTGAAGTTCAGCAGGAGCGCAGACGCCCC | 1507 | RVKFSRSADAPAYQQGQNQLYNELNLGRREEYD | 1508 |
| | CGCGTACCAGCAGGGCCAGAACCAGCTCTATA | | VLDKRRGRDPEMGGKPRRKNPQEGLYNELQKD | |
| | ACGAGCTCAATCTAGGACGAAGAGAGGAGTAC | | KMAEAYSEIGMKGERRRGKGHDGLYQGLSTATK | |
| | GATGTTTTGGACAAGAGACGTGGCCGGGACCC | | DTYDALHMQALPPR | |
| | TGAGATGGGGGGAAAGCCGAGAAGGAAGAAC | | | |
| | CCTCAGGAAGGCCTGTACAATGAACTGCAGAA | | | |
| | AGATAAGATGGCGGAGGCCTACAGTGAGATTG | | | |
| | GGATGAAAGGCGAGCGCCGGAGGGGCAAGG | | | |
| | GGCACGATGGCCTTTACCAGGGTCTCAGTACA | | | |
| | GCCACCAAGGACACCTACGACGCCCTTCACATG | | | |
| | CAAGCTCTTCCACCTCGT | | | |

APPENDIX 15
pBP1439--pSFG-MC.FKBPᵥ-T2A-αCD19.Q.CD8stm.ζ

| | | SEQ ID | | SEQ ID |
|---|---|---|---|---|
| Fragment | Nucleotide | NO: | Peptide | NO: |
| MyD88 | ATGGCTGCAGGAGGTCCCGGCGCGGGGTCTGC | 1509 | MAAGGPGAGSAAPVSSTSSLPLAALNMRVRRRL | 1510 |
| | GGCCCCGGTCTCCTCCACATCCTCCCTTCCCCTG | | SLFLNVRTQVAADWTALAEEMDFEYLEIRQLETQ | |
| | GCTGCTCTCAACATGCGAGTGCGGCGCCGCCT | | ADPTGRLLDAWQGRPGASVGRLLDLLTKLGRDD | |
| | GTCTCTGTTCTTGAACGTGCGGACACAGGTGG | | VLLELGPSIEEDCQKYILKQQQEEAEKPLQVAAVD | |
| | CGGCCGACTGGACCGCGCTGGCGGAGGAGAT | | SSVPRTAELAGITTLDDPLGHMPERFDAFICYCPS | |
| | GGACTTTGAGTACTTGGAGATCCGGCAACTGG | | DI | |
| | AGACACAAGCGGACCCCACTGGCAGGCTGCTG | | | |
| | GACGCCTGGCAGGGACGCCCTGGCGCCTCTGT | | | |
| | AGGCCGACTGCTCGATCTGCTTACCAAGCTGG | | | |
| | GCCGCGACGACGTGCTGCTGGAGCTGGGACCC | | | |
| | AGCATTGAGGAGGATTGCCAAAAGTATATCTT | | | |
| | GAAGCAGCAGCAGGAGGAGGCTGAGAAGCCT | | | |
| | TTACAGGTGGCCGCTGTAGACAGCAGTGTCCC | | | |
| | ACGGACAGCAGAGCTGGCGGGCATCACCACAC | | | |
| | TTGATGACCCCCTGGGGCATATGCCTGAGCGTT | | | |
| | TCGATGCCTTCATCTGCTATTGCCCCAGCGACA | | | |
| | TC | | | |
| Linker | GTCGAG | 1511 | VE | 1512 |
| CD40 | AAAAAGGTGGCCAAGAAGCCAACCAATAAGGC | 1513 | KKVAKKPTNKAPHPKQEPQEINFPDDLPGSNTAA | 1514 |
| | CCCCCACCCCAAGCAGGAGCCCCAGGAGATCA | | PVQETLHGCQPVTQEDGKESRISVQERQ | |
| | ATTTTCCCGACGATCTTCCTGGCTCCAACACTGC | | | |
| | TGCTCCAGTGCAGGAGACTTTACATGGATGCC | | | |
| | AACCGGTCACCCAGGAGGATGGCAAAGAGAG | | | |
| | TCGCATCTCAGTGCAGGAGAGACAG | | | |
| Linker | GTCGAG | 1515 | VE | 1516 |
| FKBPv | GGAGTGCAGGTGGAGACTATTAGCCCCGGAG | 1517 | GVQVETISPGDGRTFPKRGQTCVVHYTGMLEDG | 1518 |
| | ATGGCAGAACATTCCCCAAAAGAGGACAGACT | | KKVDSSRDRNKPFKFMLGKQEVIRGWEEGVAQ | |
| | TGCGTCGTGCATTATACTGGAATGCTGGAAGA | | MSVGQRAKLTISPDYAYGATGHPGIIPPHATLVF | |
| | CGGCAAGAAGGTGGACAGCAGCCGGGACCGA | | DVELLKLE | |
| | AACAAGCCCTTCAAGTTCATGCTGGGGAAGCA | | | |
| | GGAAGTGATCCGGGGCTGGGAGGAAGGAGTC | | | |
| | GCACAGATGTCAGTGGGACAGAGGGCCAAACT | | | |
| | GACTATTAGCCCAGACTACGCTTATGGAGCAAC | | | |
| | CGGCCACCCCGGGATCATTCCCCCTCATGCTAC | | | |
| | ACTGGTCTTCGATGTGGAGCTGCTGAAGCTGG | | | |
| | AA | | | |
| Linker | GGATCTGGACCGCGG | 1519 | GSGPR | 1520 |
| T2A | GAAGGCCGAGGGAGCCTGCTGACATGTGGCG | 1521 | EGRGSLLTCGDVEENPGP | 1522 |
| | ATGTGGAGGAAAACCCAGGACCA | | | |
| Linker | CCACGG | 1523 | PR | 1524 |
| Signal Peptide | ATGGAGTTTGGACTTTCTTGGTTGTTTTTGGTG | 1525 | MEFGLSWLFLVAILKGVQCSR | 1526 |
| | GCAATTCTGAAGGGTGTCCAGTGTAGCAGG | | | |
| FMC63 VL | GACATCCAGATGACACAGACTACATCCTCCCTG | 1527 | DIQMTQTTSSLSASLGDRVTISCRASQDISKYLNW | 1528 |
| | TCTGCCTCTCTGGGAGACAGAGTCACCATCAGT | | YQQKPDGTVKLLIYHTSRLHSGVPSRFSGSGSGTD | |
| | TGCAGGGCAAGTCAGGACATTAGTAAATATTT | | YSLTISNLEQEDIATYFCQQGNTLPYTFGGGTKLEIT | |
| | AAATTGGTATCAGCAGAAACCAGATGGAACTG | | | |
| | TTAAACTCCTGATCTACCATACATCAAGATTAC | | | |
| | ACTCAGGAGTCCCATCAAGGTTCAGTGGCAGT | | | |
| | GGGTCTGGAACAGATTATTCTCTCACCATTAGC | | | |
| | AACCTGGAGCAAGAAGATATTGCCACTTACTTT | | | |
| | TGCCAACAGGGTAATACGCTTCCGTACACGTTC | | | |
| | GGAGGGGGGACTAAGTTGGAAATAACA | | | |
| Flex | GGCGGAGGAAGCGGAGGTGGGGGC | 1529 | GGGSGGGG | 1530 |
| FMC63 VH | GAGGTGAAACTGCAGGAGTCAGGACCTGGCCT | 1531 | EVKLQESGPGLVAPSQSLSVTCTVSGVSLPDYGVS | 1532 |
| | GGTGGCGCCCTCACAGAGCCTGTCCGTCACAT | | WIRQPPRKGLEWLGVIWGSETTYYNSALKSRLTII | |
| | GCACTGTCTCAGGGGTCTCATTACCCGACTATG | | KDNSKSQVFLKMNSLQTDDTAIYYCAKHYYYGGS | |
| | GTGTAAGCTGGATTCGCCAGCCTCCACGAAAG | | YAMDYWGQGTSVTVSS | |
| | GGTCTGGAGTGGCTGGGAGTAATATGGGGTA | | | |
| | GTGAAACCACATACTATAATTCAGCTCTCAAAT | | | |
| | CCAGACTGACCATCATCAAGGACAACTCCAAG | | | |
| | AGCCAAGTTTTCTTAAAAATGAACAGTCTGCAA | | | |
| | ACTGATGACACAGCCATTTACTACTGTGCCAAA | | | |
| | CATTATTACTACGGTGGTAGCTATGCTATGGAC | | | |
| | TACTGGGGTCAAGGAACCTCAGTCACCGTCTCC | | | |
| | TCA | | | |
| Linker | GGATCC | 1533 | GS | 1534 |
| CD34 epitope | GAACTTCCTACTCAGGGGACTTTCTCAAACGTT | 1535 | ELPTQGTFSNVSTNVS | 1536 |
| | AGCACAAACGTAAGT | | | |
| CD8 stalk | CCCGCCCCAAGACCCCCCACACCTGCGCCGACC | 1537 | PAPRPPTPAPTIASQPLSLRPEACRPAAGGAVHT | 1538 |
| | ATTGCTTCTCAACCCCTGAGTTTGAGACCCGAG | | RGLDFACD | |
| | GCCTGCCGGCCAGCTGCCGGCGGGGCCGTGCA | | | |
| | TACAAGAGGACTCGATTTCGCTTGCGAC | | | |
| CD8 | ATCTATATCTGGGCACCTCTCGCTGGCACCTGT | 1539 | IYIWAPLAGTCGVLLLSLVITLYCNHRNRRRVCKC | 1540 |
| transmembrane | GGAGTCCTTCTGCTCAGCCTGGTTATTACTCTG | | PR | |
| | TACTGTAATCACCGGAATCGCCGCCGCGTTTGT | | | |
| | AAGTGTCCCAGG | | | |
| Linker | GTCGAC | 1541 | VD | 1542 |
| CD3ζ | AGAGTGAAGTTCAGCAGGAGCGCAGACGCCCC | 1543 | RVKFSRSADAPAYQQGQNQLYNELNLGRREEYD | 1544 |
| | CGCGTACCAGCAGGGCCAGAACCAGCTCTATA | | VLDKRRGRDPEMGGKPRRKNPQEGLYNELQKD | |
| | ACGAGCTCAATCTAGGACGAAGAGAGGAGTAC | | KMAEAYSEIGMKGERRRGKGHDGLYQGLSTATK | |
| | GATGTTTTGGACAAGAGACGTGGCCGGGACCC | | DTYDALHMQALPPR | |
| | TGAGATGGGGGGAAAGCCGAGAAGGAAGAAC | | | |
| | CCTCAGGAAGGCCTGTACAATGAACTGCAGAA | | | |
| | AGATAAGATGGCGGAGGCCTACAGTGAGATTG | | | |
| | GGATGAAAGGCGAGCGCCGGAGGGGCAAGG | | | |
| | GGCACGATGGCCTTTACCAGGGTCTCAGTACA | | | |
| | GCCACCAAGGACACCTACGACGCCCTTCACATG | | | |
| | CAAGCTCTTCCACCTCGT | | | |

APPENDIX 16
pBP1440--pSFG-FKBPv.ΔC9.T2A-αCD19.Q.CD8stm.ζ.T2A.P2A-MC.FKBP_{wt}.FRB_{L}

| | | SEQ ID | | SEQ ID |
|---|---|---|---|---|
| Fragment | Nucleotide | NO: | Peptide | NO: |
| MyD88 | ATGGCTGCAGGAGGTCCCGGCGCGGGGTCTGC | 1545 | MAAGGPGAGSAAPVSSTSSLPLAALNMRVRRRL | 1546 |
| | GGCCCCGGTCTCCTCCACATCCTCCCTTCCCCTG | | SLFLNVRTQVAADWTALAEEMDFEYLEIRQLETQ | |
| | GCTGCTCTCAACATGCGAGTGCGGCGCCGCCT | | ADPTGRLLDAWQGRPGASVGRLLDLLTKLGRDD | |
| | GTCTCTGTTCTTGAACGTGCGGACACAGGTGG | | VLLELGPSIEEDCQKYILKQQQEEAEKPLQVAAVD | |
| | CGGCCGACTGGACCGCGCTGGCGGAGGAGAT | | SSVPRTAELAGITTLDDPLGHMPERFDAFICYCPS | |
| | GGACTTTGAGTACTTGGAGATCCGGCAACTGG | | DI | |
| | AGACACAAGCGGACCCCACTGGCAGGCTGCTG | | | |
| | GACGCCTGGCAGGGACGCCCTGGCGCCTCTGT | | | |
| | AGGCCGACTGCTCGATCTGCTTACCAAGCTGG | | | |
| | GCCGCGACGACGTGCTGCTGGAGCTGGGACCC | | | |
| | AGCATTGAGGAGGATTGCCAAAAGTATATCTT | | | |
| | GAAGCAGCAGCAGGAGGAGGCTGAGAAGCCT | | | |
| | TTACAGGTGGCCGCTGTAGACAGCAGTGTCCC | | | |
| | ACGGACAGCAGAGCTGGCGGGCATCACCACAC | | | |
| | TTGATGACCCCCTGGGGCATATGCCTGAGCGTT | | | |
| | TCGATGCCTTCATCTGCTATTGCCCCAGCGACA | | | |
| | TC | | | |
| Linker | GTCGAG | 1547 | VE | 1548 |
| CD40 | AAAAAGGTGGCCAAGAAGCCAACCAATAAGGC | 1549 | KKVAKKPTNKAPHPKQEPQEINFPDDLPGSNTAA | 1550 |
| | CCCCCACCCCAAGCAGGAGCCCCAGGAGATCA | | PVQETLHGCQPVTQEDGKESRISVQERQ | |
| | ATTTTCCCGACGATCTTCCTGGCTCCAACACTGC | | | |
| | TGCTCCAGTGCAGGAGACTTTACATGGATGCC | | | |
| | AACCGGTCACCCAGGAGGATGGCAAAGAGAG | | | |
| | TCGCATCTCAGTGCAGGAGAGACAG | | | |
| Linker | GTCGAG | 1551 | VE | 1552 |
| FKBP_{WT}′ | GGCGTCCAAGTCGAAACCATTAGTCCCGGCGA | 1553 | GVQVETISPGDGRTFPKRGQTCVVHYTGMLEDG | 1554 |
| | TGGCAGAACATTTCCTACAAGGGGACAAACAT | | KKFDSSRDRNKPFKFMLGKQEVIRGWEEGVAQ | |
| | GTGTCGTCCATTATACAGGCATGTTGGAGGAC | | MSVGQRAKLTISPDYAYGATGHPGIIPPHATLVF | |
| | GGCAAAAAGTTCGACAGTAGTAGAGATCGCAA | | DVELLKLE | |
| | TAAACCTTTCAAATTCATGTTGGGAAAACAAGA | | | |
| | AGTCATTAGGGGATGGGAGGAGGGCGTGGCT | | | |
| | CAAATGTCCGTCGGCCAACGCGCTAAGCTCACC | | | |
| | ATCAGCCCCGACTACGCATACGGCGCTACCGG | | | |
| | ACATCCCGGAATTATTCCCCCTCACGCTACCTTG | | | |
| | GTGTTTGACGTCGAACTGTTGAAGCTCGAA | | | |
| Linker | GTCGAG | 1555 | VE | 1556 |
| FRB_{L} | CAATTGGAAATGTGGCATGAAGGGTTGGAAGA | 1557 | QLEMWHEGLEEASRLYFGERNVKGMFEVLEPLH | 1558 |
| | AGCTTCAAGGCTGTACTTCGGAGAGAGGAACG | | AMMERGPQTLKETSFNQAYGRDLMEAQEWCR | |
| | TGAAGGGCATGTTTGAGGTTCTTGAACCTCTGC | | KYMKSGNVKDLLQAWDLYYHVFRRISK | |
| | ACGCCATGATGGAACGGGGACCGCAGACACTG | | | |
| | AAAGAAACCTCTTTTAATCAGGCCTACGGCAGA | | | |
| | GACCTGATGGAGGCCCAAGAATGGTGTAGAAA | | | |
| | GTATATGAAATCCGGTAACGTGAAAGACCTGC | | | |
| | TCCAGGCCTGGGACCTTTATTACCATGTGTTCA | | | |
| | GGCGGATCAGTAAG | | | |
| Linker | GGCTCAGGT | 1559 | GSG | 1560 |
| T2A | GAAGGCCGAGGGAGCCTGCTGACATGTGGCG | 1561 | EGRGSLLTCGDVEENPGP | 1562 |
| | ATGTGGAGGAAAACCCAGGACCA | | | |
| Linker | CCACGG | 1563 | PR | 1564 |
| Signal Peptide | ATGGAGTTTGGACTTTCTTGGTTGTTTTTGGTG | 1565 | MEFGLSWLFLVAILKGVQCSR | 1566 |
| | GCAATTCTGAAGGGTGTCCAGTGTAGCAGG | | | |
| FMC63 VL | GACATCCAGATGACACAGACTACATCCTCCCTG | 1567 | DIQMTQTTSSLSASLGDRVTISCRASQDISKYLNW | 1568 |
| | TCTGCCTCTCTGGGAGACAGAGTCACCATCAGT | | YQQKPDGTVKLLIYHTSRLHSGVPSRFSGSGSGTD | |
| | TGCAGGGCAAGTCAGGACATTAGTAAATATTT | | YSLTISNLEQEDIATYFCQQGNTLPYTFGGGTKLEIT | |
| | AAATTGGTATCAGCAGAAACCAGATGGAACTG | | | |
| | TTAAACTCCTGATCTACCATACATCAAGATTAC | | | |
| | ACTCAGGAGTCCCATCAAGGTTCAGTGGCAGT | | | |
| | GGGTCTGGAACAGATTATTCTCTCACCATTAGC | | | |
| | AACCTGGAGCAAGAAGATATTGCCACTTACTTT | | | |
| | TGCCAACAGGGTAATACGCTTCCGTACACGTTC | | | |
| | GGAGGGGGGACTAAGTTGGAAATAACA | | | |
| Flex | GGCGGAGGAAGCGGAGGTGGGGGC | 1569 | GGGSGGGG | 1570 |
| FMC63 VH | GAGGTGAAACTGCAGGAGTCAGGACCTGGCCT | 1571 | EVKLQESGPGLVAPSQSLSVTCTVSGVSLPDYGVS | 1572 |
| | GGTGGCGCCCTCACAGAGCCTGTCCGTCACAT | | WIRQPPRKGLEWLGVIWGSETTYYNSALKSRLTII | |
| | GCACTGTCTCAGGGGTCTCATTACCCGACTATG | | KDNSKSQVFLKMNSLQTDDTAIYYCAKHYYYGGS | |
| | GTGTAAGCTGGATTCGCCAGCCTCCACGAAAG | | YAMDYWGQGTSVTVSS | |
| | GGTCTGGAGTGGCTGGGAGTAATATGGGGTA | | | |
| | GTGAAACCACATACTATAATTCAGCTCTCAAAT | | | |
| | CCAGACTGACCATCATCAAGGACAACTCCAAG | | | |
| | AGCCAAGTTTTCTTAAAAATGAACAGTCTGCAA | | | |
| | ACTGATGACACAGCCATTTACTACTGTGCCAAA | | | |
| | CATTATTACTACGGTGGTAGCTATGCTATGGAC | | | |
| | TACTGGGGTCAAGGAACCTCAGTCACCGTCTCC | | | |
| | TCA | | | |
| Linker | GGATCC | 1573 | GS | 1574 |
| CD34 epitope | GAACTTCCTACTCAGGGGACTTTCTCAAACGTT | 1575 | ELPTQGTFSNVSTNVS | 1576 |
| | AGCACAAACGTAAGT | | | |
| CD8 stalk | CCCGCCCCAAGACCCCCCACACCTGCGCCGACC | 1577 | PAPRPPTPAPTIASQPLSLRPEACRPAAGGAVHT | 1578 |
| | ATTGCTTCTCAACCCCTGAGTTTGAGACCCGAG | | RGLDFACD | |
| | GCCTGCCGGCCAGCTGCCGGCGGGGCCGTGCA | | | |
| | TACAAGAGGACTCGATTTCGCTTGCGAC | | | |
| CD8 | ATCTATATCTGGGCACCTCTCGCTGGCACCTGT | 1579 | IYIWAPLAGTCGVLLLSLVITLYCNHRNRRRVCKC | 1580 |
| transmembrane | GGAGTCCTTCTGCTCAGCCTGGTTATTACTCTG | | PR | |
| | TACTGTAATCACCGGAATCGCCGCCGCGTTTGT | | | |
| | AAGTGTCCCAGG | | | |
| Linker | GTCGAC | 1581 | VD | 1582 |
| CD3ζ | AGAGTGAAGTTCAGCAGGAGCGCAGACGCCCC | 1583 | RVKFSRSADAPAYQQGQNQLYNELNLGRREEYD | 1584 |
| | CGCGTACCAGCAGGGCCAGAACCAGCTCTATA | | VLDKRRGRDPEMGGKPRRKNPQEGLYNELQKD | |
| | ACGAGCTCAATCTAGGACGAAGAGAGGAGTAC | | KMAEAYSEIGMKGERRRGKGHDGLYQGLSTATK | |
| | GATGTTTTGGACAAGAGACGTGGCCGGGACCC | | DTYDALHMQALPPR | |
| | TGAGATGGGGGGAAAGCCGAGAAGGAAGAAC | | | |
| | CCTCAGGAAGGCCTGTACAATGAACTGCAGAA | | | |
| | AGATAAGATGGCGGAGGCCTACAGTGAGATTG | | | |
| | GGATGAAAGGCGAGCGCCGGAGGGGCAAGG | | | |
| | GGCACGATGGCCTTTACCAGGGTCTCAGTACA | | | |
| | GCCACCAAGGACACCTACGACGCCCTTCACATG | | | |
| | CAAGCTCTTCCACCTCGT | | | |
| Linker | ggttccgga | 1585 | GSG | 1586 |
| T2A | GAAGGCCGAGGGAGCCTGCTGACATG | 1587 | EGRGSLLTCGDVEENPGP | 1588 |
| | TGGCGATGTGGAGGAAAACCCAGGAC | | | |
| | CA | | | |
| Linker | ggatctgga | 1589 | GSG | 1590 |
| P2A | GCAACGAATTTTTCCCTGCTGAAACAG | 1591 | ATNFSLLKQAGDVEENPGP | 1592 |
| | GCAGGGGACGTAGAGGAAAATCCTGG | | | |
| | TCCT | | | |
| MyD88 | ATGGCTGCAGGAGGTCCCGGCGCGGGGTCTGC | 1593 | MAAGGPGAGSAAPVSSTSSLPLAALNMRVRRRL | 1594 |
| | GGCCCCGGTCTCCTCCACATCCTCCCTTCCCCTG | | SLFLNVRTQVAADWTALAEEMDFEYLEIRQLETQ | |
| | GCTGCTCTCAACATGCGAGTGCGGCGCCGCCT | | ADPTGRLLDAWQGRPGASVGRLLDLLTKLGRDD | |
| | GTCTCTGTTCTTGAACGTGCGGACACAGGTGG | | VLLELGPSIEEDCQKYILKQQQEEAEKPLQVAAVD | |
| | CGGCCGACTGGACCGCGCTGGCGGAGGAGAT | | SSVPRTAELAGITTLDDPLGHMPERFDAFICYCPS | |
| | GGACTTTGAGTACTTGGAGATCCGGCAACTGG | | DI | |
| | AGACACAAGCGGACCCCACTGGCAGGCTGCTG | | | |
| | GACGCCTGGCAGGGACGCCCTGGCGCCTCTGT | | | |
| | AGGCCGACTGCTCGATCTGCTTACCAAGCTGG | | | |
| | GCCGCGACGACGTGCTGCTGGAGCTGGGACCC | | | |
| | AGCATTGAGGAGGATTGCCAAAAGTATATCTT | | | |
| | GAAGCAGCAGCAGGAGGAGGCTGAGAAGCCT | | | |
| | TTACAGGTGGCCGCTGTAGACAGCAGTGTCCC | | | |
| | ACGGACAGCAGAGCTGGCGGGCATCACCACAC | | | |
| | TTGATGACCCCCTGGGGCATATGCCTGAGCGTT | | | |
| | TCGATGCCTTCATCTGCTATTGCCCCAGCGACA | | | |
| | TC | | | |
| Linker | GTCGAG | 1595 | VE | 1596 |
| CD40 | AAAAAGGTGGCCAAGAAGCCAACCAATAAGGC | 1597 | KKVAKKPTNKAPHPKQEPQEINFPDDLPGSNTAA | 1598 |
| | CCCCCACCCCAAGCAGGAGCCCCAGGAGATCA | | PVQETLHGCQPVTQEDGKESRISVQERQ | |
| | ATTTTCCCGACGATCTTCCTGGCTCCAACACTGC | | | |
| | TGCTCCAGTGCAGGAGACTTTACATGGATGCC | | | |
| | AACCGGTCACCCAGGAGGATGGCAAAGAGAG | | | |
| | TCGCATCTCAGTGCAGGAGAGACAG | | | |
| Linker | GTCGAG | 1599 | VE | 1600 |
| Linker | GTCGAG | 1601 | VE | 1602 |
| STOPtail | TCAGGCGGTGGCTCAGGTCCGCGGTGA | 1603 | SGGGSGPR-STOP | 1604 |

APPENDIX 17
pBP1460--pSFG-FKBPv.ΔC9.T2A-αCD19.Q.CD8stm.ζ.T2A.P2A-MC.FKBP_{wt}.FRB_{L}

| | | SEQ ID | | SEQ ID |
|---|---|---|---|---|
| Fragment | Nucleotide | NO: | Peptide | NO: |
| Leader peptide | ATGCTCGAGCAATTGGAG | 1605 | MLEQLE | 1606 |
| FKBPv | GGAGTGCAGGTGGAGACTATTAGCCCCGGAG | 1607 | GVQVETISPGDGRTFPKRGQTCVVHYTGMLEDG | 1608 |
| | ATGGCAGAACATTCCCCAAAAGAGGACAGACT | | KKVDSSRDRNKPFKFMLGKQEVIRGWEEGVAQ | |
| | TGCGTCGTGCATTATACTGGAATGCTGGAAGA | | MSVGQRAKLTISPDYAYGATGHPGIIPPHATLVF | |
| | CGGCAAGAAGGTGGACAGCAGCCGGGACCGA | | DVELLKLE | |
| | AACAAGCCCTTCAAGTTCATGCTGGGGAAGCA | | | |
| | GGAAGTGATCCGGGGCTGGGAGGAAGGAGTC | | | |
| | GCACAGATGTCAGTGGGACAGAGGGCCAAACT | | | |
| | GACTATTAGCCCAGACTACGCTTATGGAGCAAC | | | |
| | CGGCCACCCCGGGATCATTCCCCCTCATGCTAC | | | |
| | ACTGGTCTTCGATGTGGAGCTGCTGAAGCTGG | | | |
| | AA | | | |
| Linker | TCAGGCGGTGGCTCAGGTGTGGAC | 1609 | SGGGSGVD | 1610 |
| Δcaspase9 | GGATTTGGTGATGTCGGTGCTCTTGAGAGTTT | 1611 | GFGDVGALESLRGNADLAYILSMEPCGHCLIINN | 1612 |
| | GAGGGGAAATGCAGATTTGGCTTACATCCTGA | | VNFCRESGLRTRTGSNIDCEKLRRRFSSLHFMVEV | |
| | GCATGGAGCCCTGTGGCCACTGCCTCATTATCA | | KGDLTAKKMVLALLELARQDHGALDCCVVVILSH | |
| | ACAATGTGAACTTCTGCCGTGAGTCCGGGCTCC | | GCQASHLQFPGAVYGTDGCPVSVEKIVNIFNGTS | |
| | GCACCCGCACTGGCTCCAACATCGACTGTGAG | | CPSLGGKPKLFFIQACGGEQKDHGFEVASTSPED | |
| | AAGTTGCGGCGTCGCTTCTCCTCGCTGCATTTC | | ESPGSNPEPDATPFQEGLRTFDQLDAISSLPTPSDI | |
| | ATGGTGGAGGTGAAGGGCGACCTGACTGCCA | | FVSYSTFPGFVSWRDPKSGSWYVETLDDIFEQW | |
| | AGAAAATGGTGCTGGCTTTGCTGGAGCTGGCG | | AHSEDLQSLLLRVANAVSVKGIYKQMPGCFNFLR | |
| | CGGCAGGACCACGGTGCTCTGGACTGCTGCGT | | KKLFFKTSASRA | |
| | GGTGGTCATTCTCTCTCACGGCTGTCAGGCCAG | | | |
| | CCACCTGCAGTTCCCAGGGGCTGTCTACGGCAC | | | |
| | AGATGGATGCCCTGTGTCGGTCGAGAAGATTG | | | |
| | TGAACATCTTCAATGGGACCAGCTGCCCCAGCC | | | |
| | TGGGAGGGAAGCCCAAGCTCTTTTTCATCCAG | | | |
| | GCCTGTGGTGGGGAGCAGAAAGATCATGGGTT | | | |
| | TGAGGTGGCCTCCACTTCCCCTGAAGACGAGTC | | | |
| | CCCTGGCAGTAACCCCGAGCCAGATGCCACCC | | | |
| | CGTTCCAGGAAGGTTTGAGGACCTTCGACCAG | | | |
| | CTGGACGCCATATCTAGTTTGCCCACACCCAGT | | | |
| | GACATCTTTGTGTCCTACTCTACTTTCCCAGGTT | | | |
| | TTGTTTCCTGGAGGGACCCCAAGAGTGGCTCCT | | | |
| | GGTACGTTGAGACCCTGGACGACATCTTTGAG | | | |
| | CAGTGGGCTCACTCTGAAGACCTGCAGTCCCTC | | | |
| | CTGCTTAGGGTCGCTAATGCTGTTTCGGTGAAA | | | |
| | GGGATTTATAAACAGATGCCTGGTTGCTTTAAT | | | |
| | TTCCTCCGGAAAAAACTTTTCTTTAAAACATCA | | | |
| | GCTAGCAGAGCC | | | |
| Linker | GGATCTGGACCGCGG | 1613 | GSGPR | 1614 |
| T2A | GAAGGCCGAGGGAGCCTGCTGACATGTGGCG | 1615 | EGRGSLLTCGDVEENPGP | 1616 |
| | ATGTGGAGGAAAACCCAGGACCA | | | |
| Linker | CCACGG | 1617 | PR | 1618 |
| Signal Peptide | ATGGAGTTTGGACTTTCTTGGTTGTTTTTGGTG | 1619 | MEFGLSWLFLVAILKGVQCSR | 1620 |
| | GCAATTCTGAAGGGTGTCCAGTGTAGCAGG | | | |
| FMC63 VL | GACATCCAGATGACACAGACTACATCCTCCCTG | 1621 | DIQMTQTTSSLSASLGDRVTISCRASQDISKYLNW | 1622 |
| | TCTGCCTCTCTGGGAGACAGAGTCACCATCAGT | | YQQKPDGTVKLLIYHTSRLHSGVPSRFSGSGSGTD | |
| | TGCAGGGCAAGTCAGGACATTAGTAAATATTT | | YSLTISNLEQEDIATYFCQQGNTLPYTFGGGTKLEIT | |
| | AAATTGGTATCAGCAGAAACCAGATGGAACTG | | | |
| | TTAAACTCCTGATCTACCATACATCAAGATTAC | | | |
| | ACTCAGGAGTCCCATCAAGGTTCAGTGGCAGT | | | |
| | GGGTCTGGAACAGATTATTCTCTCACCATTAGC | | | |
| | AACCTGGAGCAAGAAGATATTGCCACTTACTTT | | | |
| | TGCCAACAGGGTAATACGCTTCCGTACACGTTC | | | |
| | GGAGGGGGGACTAAGTTGGAAATAACA | | | |
| Flex | GGCGGAGGAAGCGGAGGTGGGGGC | 1623 | GGGSGGGG | 1624 |
| FMC63 VH | GAGGTGAAACTGCAGGAGTCAGGACCTGGCCT | 1625 | EVKLQESGPGLVAPSQSLSVTCTVSGVSLPDYGVS | 1626 |
| | GGTGGCGCCCTCACAGAGCCTGTCCGTCACAT | | WIRQPPRKGLEWLGVIWGSETTYYNSALKSRLTII | |
| | GCACTGTCTCAGGGGTCTCATTACCCGACTATG | | KDNSKSQVFLKMNSLQTDDTAIYYCAKHYYYGGS | |
| | GTGTAAGCTGGATTCGCCAGCCTCCACGAAAG | | YAMDYWGQGTSVTVSS | |
| | GGTCTGGAGTGGCTGGGAGTAATATGGGGTA | | | |
| | GTGAAACCACATACTATAATTCAGCTCTCAAAT | | | |
| | CCAGACTGACCATCATCAAGGACAACTCCAAG | | | |
| | AGCCAAGTTTTCTTAAAAATGAACAGTCTGCAA | | | |
| | ACTGATGACACAGCCATTTACTACTGTGCCAAA | | | |
| | CATTATTACTACGGTGGTAGCTATGCTATGGAC | | | |
| | TACTGGGGTCAAGGAACCTCAGTCACCGTCTCC | | | |
| | TCA | | | |
| Linker | GGATCC | 1627 | GS | 1628 |
| CD34 epitope | GAACTTCCTACTCAGGGGACTTTCTCAAACGTT | 1629 | ELPTQGTFSNVSTNVS | 1630 |
| | AGCACAAACGTAAGT | | | |
| CD8 stalk | CCCGCCCCAAGACCCCCCACACCTGCGCCGACC | 1631 | PAPRPPTPAPTIASQPLSLRPEACRPAAGGAVHT | 1632 |
| | ATTGCTTCTCAACCCCTGAGTTTGAGACCCGAG | | RGLDFACD | |
| | GCCTGCCGGCCAGCTGCCGGCGGGGCCGTGCA | | | |
| | TACAAGAGGACTCGATTTCGCTTGCGAC | | | |
| CD8 | ATCTATATCTGGGCACCTCTCGCTGGCACCTGT | 1633 | IYIWAPLAGTCGVLLLSLVITLYCNHRNRRRVCKC | 1634 |
| transmembrane | GGAGTCCTTCTGCTCAGCCTGGTTATTACTCTG | | PR | |
| | TACTGTAATCACCGGAATCGCCGCCGCGTTTGT | | | |
| | AAGTGTCCCAGG | | | |
| Linker | GTCGAC | 1635 | VD | 1636 |
| CD3ζ | AGAGTGAAGTTCAGCAGGAGCGCAGACGCCCC | 1637 | RVKFSRSADAPAYQQGQNQLYNELNLGRREEYD | 1638 |
| | CGCGTACCAGCAGGGCCAGAACCAGCTCTATA | | VLDKRRGRDPEMGGKPRRKNPQEGLYNELQKD | |
| | ACGAGCTCAATCTAGGACGAAGAGAGGAGTAC | | KMAEAYSEIGMKGERRRGKGHDGLYQGLSTATK | |
| | GATGTTTTGGACAAGAGACGTGGCCGGGACCC | | DTYDALHMQALPPR | |
| | TGAGATGGGGGGAAAGCCGAGAAGGAAGAAC | | | |
| | CCTCAGGAAGGCCTGTACAATGAACTGCAGAA | | | |
| | AGATAAGATGGCGGAGGCCTACAGTGAGATTG | | | |
| | GGATGAAAGGCGAGCGCCGGAGGGGCAAGG | | | |
| | GGCACGATGGCCTTTACCAGGGTCTCAGTACA | | | |
| | GCCACCAAGGACACCTACGACGCCCTTCACATG | | | |
| | CAAGCTCTTCCACCTCGT | | | |
| Linker | ggttccgga | 1639 | GSG | 1640 |
| T2A | GAAGGCCGAGGGAGCCTGCTGACATG | 1641 | EGRGSLLTCGDVEENPGP | 1642 |
| | TGGCGATGTGGAGGAAAACCCAGGAC | | | |
| | CA | | | |
| Linker | ggatctgga | 1643 | GSG | 1644 |
| P2A | GCAACGAATTTTTCCCTGCTGAAACAG | 1645 | ATNFSLLKQAGDVEENPGP | 1646 |
| | GCAGGGGACGTAGAGGAAAATCCTGG | | | |
| | TCCT | | | |
| MyD88 | ATGGCTGCAGGAGGTCCCGGCGCGGGGTCTGC | 1647 | MAAGGPGAGSAAPVSSTSSLPLAALNMRVRRRL | 1648 |
| | GGCCCCGGTCTCCTCCACATCCTCCCTTCCCCTG | | SLFLNVRTQVAADWTALAEEMDFEYLEIRQLETQ | |
| | GCTGCTCTCAACATGCGAGTGCGGCGCCGCCT | | ADPTGRLLDAWQGRPGASVGRLLDLLTKLGRDD | |
| | GTCTCTGTTCTTGAACGTGCGGACACAGGTGG | | VLLELGPSIEEDCQKYILKQQQEEAEKPLQVAAVD | |
| | CGGCCGACTGGACCGCGCTGGCGGAGGAGAT | | SSVPRTAELAGITTLDDPLGHMPERFDAFICYCPS | |
| | GGACTTTGAGTACTTGGAGATCCGGCAACTGG | | DI | |
| | AGACACAAGCGGACCCCACTGGCAGGCTGCTG | | | |
| | GACGCCTGGCAGGGACGCCCTGGCGCCTCTGT | | | |
| | AGGCCGACTGCTCGATCTGCTTACCAAGCTGG | | | |
| | GCCGCGACGACGTGCTGCTGGAGCTGGGACCC | | | |
| | AGCATTGAGGAGGATTGCCAAAAGTATATCTT | | | |
| | GAAGCAGCAGCAGGAGGAGGCTGAGAAGCCT | | | |
| | TTACAGGTGGCCGCTGTAGACAGCAGTGTCCC | | | |
| | ACGGACAGCAGAGCTGGCGGGCATCACCACAC | | | |
| | TTGATGACCCCCTGGGGCATATGCCTGAGCGTT | | | |
| | TCGATGCCTTCATCTGCTATTGCCCCAGCGACA | | | |
| | TC | | | |
| Linker | GTCGAG | 1649 | VE | 1650 |
| CD40 | AAAAAGGTGGCCAAGAAGCCAACCAATAAGGC | 1651 | KKVAKKPTNKAPHPKQEPQEINFPDDLPGSNTAA | 1652 |
| | CCCCCACCCCAAGCAGGAGCCCCAGGAGATCA | | PVQETLHGCQPVTQEDGKESRISVQERQ | |
| | ATTTTCCCGACGATCTTCCTGGCTCCAACACTGC | | | |
| | TGCTCCAGTGCAGGAGACTTTACATGGATGCC | | | |
| | AACCGGTCACCCAGGAGGATGGCAAAGAGAG | | | |
| | TCGCATCTCAGTGCAGGAGAGACAG | | | |
| Linker | GTCGAG | 1653 | VE | 1654 |
| FKBP_{WT}′ | GGCGTCCAAGTCGAAACCATTAGTCCCGGCGA | 1655 | GVQVETISPGDGRTFPKRGQTCVVHYTGMLEDG | 1656 |
| | TGGCAGAACATTTCCTACAAGGGGACAAACAT | | KKFDSSRDRNKPFKFMLGKQEVIRGWEEGVAQ | |
| | GTGTCGTCCATTATACAGGCATGTTGGAGGAC | | MSVGQRAKLTISPDYAYGATGHPGIIPPHATLVF | |
| | GGCAAAAAGTTCGACAGTAGTAGAGATCGCAA | | DVELLKLE | |
| | TAAACCTTTCAAATTCATGTTGGGAAAACAAGA | | | |
| | AGTCATTAGGGGATGGGAGGAGGGCGTGGCT | | | |
| | CAAATGTCCGTCGGCCAACGCGCTAAGCTCACC | | | |
| | ATCAGCCCCGACTACGCATACGGCGCTACCGG | | | |
| | ACATCCCGGAATTATTCCCCCTCACGCTACCTTG | | | |
| | GTGTTTGACGTCGAACTGTTGAAGCTCGAA | | | |
| Linker | GTCGAG | 1657 | VE | 1658 |
| FRB_{L} | CAATTGGAAATGTGGCATGAAGGGTTGGAAGA | 1659 | QLEMWHEGLEEASRLYFGERNVKGMFEVLEPLH | 1660 |
| | AGCTTCAAGGCTGTACTTCGGAGAGAGGAACG | | AMMERGPQTLKETSFNQAYGRDLMEAQEWCR | |
| | TGAAGGGCATGTTTGAGGTTCTTGAACCTCTGC | | KYMKSGNVKDLLQAWDLYYHVFRRISK | |
| | ACGCCATGATGGAACGGGGACCGCAGACACTG | | | |
| | AAAGAAACCTCTTTTAATCAGGCCTACGGCAGA | | | |
| | GACCTGATGGAGGCCCAAGAATGGTGTAGAAA | | | |
| | GTATATGAAATCCGGTAACGTGAAAGACCTGC | | | |
| | TCCAGGCCTGGGACCTTTATTACCATGTGTTCA | | | |
| | GGCGGATCAGTAAG | | | |
| STOPtail | TCAGGCGGTGGCTCAGGTCCGCGGTGA | 1661 | SGGGSGPR-STOP | 1662 |

### Example 26: Dual-Switches to Control Activation and Elimination of Targeted Therapeutic Cells

[0848] The present Example provides methods related to controlling the activation and elimination of targeted therapeutic cells. The immune or therapeutic cells may be used for immunotherapy, where the therapeutic cells are targeted to solid tumor or leukemic cells, for example. Where certain methods provide data related to the use of T cells that express chimeric antigen receptors, it is understood that these methods may be modified for the use of other therapeutic cells, and hetologous polypeptides such as, for example, recombinant T cell receptors. Thus, for example, where the vectors and cells provided in this example may include the use of a CAR with an antigen recognition moiety directed against a particular antigen, or cell, the vectors and cells may be modified to include a use of a recombinant TCR directed against a particular antigen, or cell, by, for example, substituting the polynucleotide coding for the CAR with a polynucleotide coding for the recombinant TCR.

[0849] FIG. 68 provides results of assays comparing the costimulatory ability of T cells that co-express a first generation CAR and either a rapamycin/rapalog, or a rimiducid-inducible chimeric truncated MyD88/CD40 polypeptide (MC) in T cells. For these assays, the rapalog-inducible MC (MC-Rap or iRMC) comprised a wild-type FKBP12 polypeptide (F_{wt}) and a FRB_{L} polypeptide (F_{L}); the rimiducid-inducible MC (iMC+CARζ, or iMC) comprised two FKBP12ᵥ36 polypeptides (Fᵥ) (FIG. 68B). The assay compared MCRap and iMC directed costimulation on CAR-T cell killing of tumor cells. Human PBMCs containing mostly T cells were activated and transduced with retrovirus vectors pBP1455 encoding a PSCA directed first generation CAR downstream of a rapalog responsive costimulatory domain (MyD88-CD40-FKBP-FRB_{L}, termed MC-Rap), retrovirus pBP0189 in which costimulation is imparted by iMC (MyD88-CD40-FKBPᵥ₃₆-FKBPᵥ₃₆) or with a control retrovirus construct encoding the CAR, but no costimulatory molecules. After seven days of rest with IL-2, CAR-T cells were cocultured with PSCA expressing HPAC tumor cells labeled with Red Fluorescent Protein (RFP) at an effector to target ratio of 1:30. Growth of the labeled cells over one week was measured microscopically in an Incucyte chamber. In the presence of 2 nM C7-isobutyloxyrapamycin (IbuRap), MC-rap containing cells were able to control tumor cells as effectively as rimiducid stimulated iMC containing iMC+CARζ-T cells.

[0850] FIG. 69 provides results of assays comparing the costimulatory ability of T cells that co-express a first generation CAR, an MCRap polypeptide, and a rimiducid-inducible chimeric Caspase-9 polypeptide (iC9) from the same vector, where the placement of the polynuclotide that expresses the MCRap polypeptide is varied. The results provided in this assay demonstrate that the placement of MCRap within the three gene unified vector affects the degree of costimulatory activity. FIG. 69 provides a schematic representation of the various retrovirus vectors. pBP1466 places MC-Rap (MC-FKBP-FRB_{L}) 3′ to the CAR and iC9 safety switch. pBP1491 places MC-Rap between iC9 and the CAR. pBP1494 places MC-Rap 5′ to iC9 and the CAR. The CAR in each case contained an ScFV targeting the PSCA antigen. 2A cotranslational cleavage sequences separate MC-Rap from the CAR and from the iC9 apoptotic switch. FIG. 69B: provides a reporter assay of costimulatory signaling. 293 cells were transfected with 1 μg NF-κB-SeAP reporter and 3 μg of the indicated DNA constructs. After 24 hours, cultures were split to 12 wells of a 96 well plate and mock stimulated or treated with 2 nM rimiducid or 2 nM C7-isobutyloxyrapamycin in quadruplicate. Each transfection displayed minimal basal activity without stimulation while construct 1494 with MC-Rap positioned at the 5′ end of the retroviral construct displayed enhanced activity when stimulated with IbuRap. FIG. 69C provides results of CAR-T cytokine secretion assays. Human PBMCs containing mostly T cells were activated and transduced with retrovirus vectors indicated in (A). After seven days of rest with IL-2, CAR-T cells were cocultured with PSCA expressing HPAC tumor cells labeled with Red Fluorescent Protein (RFP) at an effector to target ratio of 1:5. 24 hours after the co-culture was established media was removed and interferon-Y levels determined by ELISA. Secretion of this cytokine is influenced both by signal 1 from the TCRζ component of the CAR and from costimulation through induced MC activity. This costimulation is most robust with IbuRap in construct 1494 with MC-Rap positioned at the 5′ end of the retroviral construct. FIG. 69D provides the results of CAR-T killing assays. Modified transduced or transfected T cells comprising polypeptides with the indicated topological orientations were cultured with HPAC-RFP tumor targets at an E:T ratio of 1:20 and growth of the labeled cells over one week was measured microscopically in an Incucyte chamber. In the presence of 2 nM C7-isobutyloxyrapamycin (IbuRap), construct 1494 with MC-Rap positioned at the 5′end was most effective in drug dependent tumor control. (Not shown) In each case, activation of the safety switch iC9 with rimiducid incubation caused CAR-T apoptosis and a loss of tumor control.

[0851] FIG. 70 provides results of assays comparing the costimulatory ability of T cells that co-express a first generation CAR, an MCRap polypeptide, and a rimiducid-inducible chimeric Caspase-9 polypeptide (iC9) from the same vector, where the orientation and positioning of the polynucleotide that expresses the MCRap polypeptide is varied. The orientation and positioning of FRB and FKBP was modified to compare MC costimulatory activity in the T cell that expressed the vector. FIG. 70A provides a Schematic representation of retroviral vectors. BP1493 and BP1494 places FKBP and FRB_{L} 3′ to MC and in that orientation. pBP1796 maintains the same orientation of FKBP relative to FRB but places these drug binding components at the 5′ end of the construct thus making an amino terminal fusion. Constructs BP1757 and BP1759 reverse the orientation of FRB and FKBP placing FRB_{L} at the amino terminus. The antigens targeted by the ScFV units of the CARs are indicated. FIG. 70B provides results of reporter assays assay of costimulatory signaling. 293 cells were transfected with 1 μg NF-κB-SeAP reporter and 3 μg of the indicated DNA constructs. After 24 hours, cultures were split 96 well plates and a dilution series of C7-isobutyloxyrapamycin added in quadruplicate. Each transfection displayed minimal basal activity without stimulation while construct 1757 displayed enhanced stimulation with the rapalog. FIGS. 70C and 70D provide results of PSCA-CAR-T killing assays. T cells with the indicated topological orientations of FRB_{L}, FKBP and MC were cultured with HPAC-RFP tumor targets at an E:T ratio of 1:20 (C) or 1:30 (D) and growth of the labeled cells over one week was measured microscopically in an Incucyte chamber. In the presence of 2 nM C7-isobutyloxyrapamycin (IbuRap), construct 1757 with MC-Rap positioned at the 5′end was most effective in tumor control without the addition of drug. Increased potency with drug was indicated at high E:T of 1:30 where only 1757 was able to proliferate sufficiently to maintain tumor control. FIGS. 70E, 70F, and 70G provide results of HER2-CAR-T killing assays. T cells with the indicated topological orientations of FRB_{L}, FKBP and MC were cultured with HPAC-RFP tumor targets at an E:T ratio of 1:15 (FIG. 70E), SKOV3 ovarian cancer cells (E:T=1:10) (FIG. 70F) or SKBR3-GFP breast cancer cells (E:T=1:1) (FIG. 70G) and growth of the labeled cells over one week was measured microscopically in an Incucyte chamber. In the presence of 2 nM C7-isobutyloxyrapamycin (IbuRap), construct 1759 with MC-Rap positioned at the 5′end was most effective in tumor control without the addition of drug. Increased potency with drug was indicated at high E:T of 1:30 where only 1757 was able to proliferate sufficiently to maintain tumor control. From these data it is concluded that maximal drug dependent MC-Rap potency is effected by positioning FRB then FKBP amino terminal to MC.

[0852] FIG. 71 provides results of assays that assay the apoptotic activity of T cells that co-express a first generation CAR, an MCRap polypeptide, and an iC9 polypeptide. The assays provide results showing that in these cells, the inducible apoptosis is only directed by dimerization of iC9 with rimiducid. PBMCs containing mostly T cells were activated and transduced with the indicated retroviral constructs and a control construct BP1488 that carries only MC-Rap with the CAR and no iC9. Cells were incubated with caspase 3/7 activity indicator reagent (Essen Biosciences) in an Incucyte incubator/microscope with increasing quantities of rimiducid (FIG. 71A) or C7-isobutyloxyrapamycin (FIG. 71B). At very low concentrations of rimiducid (<100 pM), the FKBPᵥ₃₆-caspase9 (iC9) component was observed to be activated from each construct but not from the MC-Rap CAR-T cells (1488) not containing iC9. Even high concentrations of IbuRap over 100 fold above the level used to activate MC-rap (normally 1 nM is used) are insufficient to activate apoptosis indicating that complex rapamycin directed heterodimerization events between coexpressed MC-FKBP-FRB_{L} and FKBP-Caspase that are theoretically possible, are not evident in this assay.

[0853] FIG. 72 provides schematic diagrams of a dual-switch iMC plus iRC9, in the form of single retroviral vector, or in two retroviral vectors. FIG. 72A provides a schematic of a unified vector design that amalgamates both the iMC activation switch (FᵥFᵥ) (present at the 3′ end of the vector) and the iRC9 (FRB and FKBP_{wt}) which is present in the vector at the 5′ end. Transduced T cells are marked with the Q-bend 10 (Q) epitope derived from CD34. The CombiCAR platform (FIG. 72B) includes the same protein components, but expressed from two retroviruses to increase the expression level of iMC and thereby the potency of the construct. iRC9 is marked by the expression of a truncated form of CD19 that contains only the extracellular domain and no intracellular signaling domain. The iMC+CARζ component incorporates iMC for costimulation and the CAR cistron which contains the Q epitope marker immediately following the ScFV.

[0854] FIG. 73A provides the results of assays of apoptosis activity in cells that express the iRC9 polypeptide, where the orientation and positioning of FRB and FKBPwt are varied. FIG. 73A provides schematic representations of iRC9 retroviral constructs BP1501 is a negative control containing only the caspase9 component without a drug-binding moiety. BP0220 is a iC9 construct in which FKBPᵥ is attached to caspase 9 producing iC9. This construct is responsive to rimiducid and not rapamycin. Constructs BP1310 and BP1311 have wild-type FKBP (to which rimiducid has poor affinity) and FRB in the indicated orientations. FIG. 73B provides results of assays of T cells transduced with various retroviral constructs of FIG. 73A. PBMCs containing mostly T cells were activated and transduced with the indicated retroviral constructs and cells were incubated with caspase 3/7 activity indicator reagent (Essen Biosciences) in an Incucyte incubator/microscope for 24 h with increasing quantities of rapamycin. Fluorescent conversion of the cells indicates cleavage of the caspase 3/7 reagent to mark apoptosis over time. FIG. 73C is a graphical representation of the maximal apoptotic activity relative to the commencement of drug treatment from the assays of FIG. 73B, as a function of rapamycin concentration. iRC9 is most effective when FRB is positioned amino-terminal to FKBP12 and caspase-9. FIG. 73D provides a Western blot of Caspase-9 transgene expression in T cells. Cells from two donors transduced with the indicated retroviral vectors were lysed and protein extracted, resolved on an SDS polyacrylamide gel, transferred to a PVDF filter and caspase-9 expression visualized by western blot. Consistent with the higher rapamycin-induced apoptotic activity of BP1310, expression was slightly higher than that of BP1311.

[0855] FIG. 74 provides results of assays comparing the activation profile of iMC+CARζ-T cells (cells express iMC and CAR) with CombiCAR-T cells (cells express iMC, CAR, and iRC9). To determine if inclusion of the chimeric caspase polypeptide from BP1311 impairs iMC+CARζ-T cell efficacy, human PBMCs were activated and transduced with the indicated retrovirus vectors. After seven days of rest with IL-2, CAR-T cells were cocultured with PSCA expressing HPAC tumor cells labeled with Red Fluorescent Protein (RFP) at an effector to target ratio of 1:10. 48 hours after the co-culture was established media was removed and interleukin-6 (IL-6, FIG. 74A), IL-2 (FIG. 74B), and interferon-Y (IFN-Y, FIG. 74C) levels determined by ELISA. Cytokine secretion was augmented by rimiducid treatment in a dose-dependent fashion and was closely similar between iMC+CARζ and CombiCAR formats. Interestingly CombiCAR was somewhat less effective to stimulate IFN secretion. FIG. 74D provides the results of a CAR-T killing assay. CAR-T cells in the indicated formats with the indicated topological orientations were cultured with HPAC-RFP tumor targets at an E:T ratio of 1:10. Growth of the labeled cells over one week was measured microscopically in an Incucyte chamber. At this level of CAR-T inclusion killing was not dependent on drug but was enhanced by basal activity of iMC (compare each CAR format with BP1373 which lacks iMC). FIG. 74E provides a Western blot of expression of iMC and chimeric caspase polypeptide in each CAR format. T Cells transduced with the indicated retroviral vectors were lysed and protein extracted, resolved on an SDS polyacrylamide gel, transferred to a PVDF filter and expression of the indicated proteins probed by western blot. Vinculin expression represents the equality of loading of each lane in the gel. Expression of iMC was similar between iMC+CARζ and CombiCAR formats.

[0856] FIG. 75 provides the results of assays of rapamycin-inducible Caspase-9 (iRC9) within unified-single- and dual-vector formats. T cells from two separate donors (877 and 904) were (anti-CD3/CD28) activated and non-transduced (NT) or transduced with retroviruses encoding CD34 epitope-marked iMC+CARζ-T (iMC-2A-CAR-zeta), (iMC-2A-iRC9-2A-CAR-zeta), or CombiCAR (co-transduction with viruses encoding iMC+CARζ-T and iRC9). A population of 5×10⁷ iMC+CARζ-T cells (1463) and T cells (1358) were enriched for transduced cells by purification with a CD34 microbead kit (Miltenyi) while CombiCAR cells were selected with CD19 microbeads that identified the marker from the chimeric caspase construct. This enrichment procedure, or ‘sorting’ of highly transduced cells yielded greater than 95% marker positivity. In FIG. 75A, cells were incubated with a Caspase 3/7 activity indicator (Essen Biosciences) in an IncuCyte plate incubator/microscope with 0, 1, or 10 nM rapamycin. Readings of apoptosis (via Caspase-3/7 activation) were automatically conducted every 4 hours and shown for unsorted (top panel) and sorted (bottom panel) cells. FIG. 75B provides graphical representations of data for both donors (and average values) at the 12-hour timepoint for unsorted (left panel) and sorted (right panel) cells. For FIG. 75C, similarly transduced T cells were incubated for 24 hours in the presence of 0, 1, or 10 nM rapamycin and stained with Annexin V and propidium iodide (PI) for cell death. Representative graphs of unsorted cells from 1 donor are shown. FIG. 75D provides graphical representations of the results of both donors from unsorted (left panel) and sorted (right panel) cells treated for 24 hours as in FIG. 75C.

[0857] FIG. 76 provides the results of in vivo experiments assessing the efficacy of different forms of iMC co-expressed in T cells with an anti-CD123 CAR directed against acute myelogenous leukemia tumors. The iMC was assessed in the form of a iMC+CARζ-T cell that does not express the iRC9 safety switch, and in the form of the dual-switch CombiCAR platform, where the cells also express iRC9. FIG. 76A provides micrographs of tumor-bearing animals determined by bioluminescence (BLI) imaging. 1.0×10⁶ GFP-Luciferase-expressing THP-1 tumor cells were injected i.v. into age-matched NSG mice. Seven days later (day 0), 2.5×10⁶ non-transduced (NT), iMC+CARζ-transduced, or CombiCAR-transduced (i.e., dual-transduced cells with iMC+CARζ-T and iRC9 vectors., marked by CD34 or CD19-derived epitopes, respectively) T cells were injected into tumor-bearing animals. Groups (n=5) were injected with rimiducid (1 mg/kg) at day 1 and day 15. Animals were imaged weekly starting on the day of T cell injection (day 0). Transduced CombiCAR cells were CD19-selected and normalized for CAR expression via CD34. FIG. 76B provides data showing the average tumor growth per group (left panel), reflected via BLI (Radiance) or % weight change post-T cell injection (right panel) is shown. FIG. 76C provides data showing the number of human T cells in spleens at termination (day 28). Left panel shows total number of human (murine(m)CD45⁻CD3⁺) T cells before or after rimiducid (AP) injection. Middle panel shows the % of human T cells with detectable CAR expression (via CD34 epitope). Right panel shows the % of human T cells with detectable iRC9 (via CD19 epitope). *=p<0.05 by Student's T test. FIG. 76D provides data showing the vector copy number (VCN) determined by qPCR from DNA derived from spleen (top) or bone marrow (bottom). Primers were chosen specific for iMC (left panels) or iCaspase-9 (right panels). *=p<0.05 by Student's T test.

[0858] FIG. 77 provides the results of in vivo experiments assessing the efficacy of different forms of iMC co-expressed in T cells with an anti-CD33 CAR directed against MOLM13 tumors. The iMC was assessed in the form of a iMC+CARζ-T cell that does not express the iRC9 safety switch, and in the form of the dual-switch CombiCAR platform, where the cells also express iRC9. FIG. 77A provides micrographs of tumor-bearing animals determined by BLI imaging. PBMCs were activated and co-transduced with retroviruses derived from the anti-CD33 iMC+CARζ-T vector (pBP1293) and the iRC9 vector (pB1385). NSG mice were engrafted with 1×10⁶ MOLM13-GFP.Fluc cells i.v. for 6 days followed by i.v. infusion of 5×10⁶ iRC9 or CD33-CombiCAR-expressing T cells. Rimiducid or placebo were given i.p. weekly after T cell infusion at 1 mg/kg. In FIG. 77A, GFP.Fluc growth was measured using IVIS bioluminescence (BLI) and average radiance was calculated (FIG. 77B). FIG. 77C provides the results of Kaplan-Meier analysis from the in vivo assay of FIG. 77A. FIG. 77D provides the results of representative FACS analysis of the rimiducid-treated CD33 CombiCAR group at termination on day 32 after T cell injection.

[0859] FIG. 78 provides the results of assays comparing the specificity and efficacy of the rimiducid inducible iC9 and rapamycin-inducible (iRC9) apoptotic switches in a whole animal model. 1.0×10⁷ T cells transduced with BP220 (containing iC9) or BP1310 (containing iRC9) and with a GFP-luciferase vector were implanted intravenously into 8-week-old female, immune-deficient mice (NOD.CgPrkdc^{scid}II2rg^{tm1Wjl}/SzJ; NSG). Mice were subjected to IVIS imaging ˜4 hrs after T cell injection (−14 hrs post-drug administration). The following day, mice were imaged just before drug injection (0 hrs), then injected IP with vehicle, rimiducid diluted in solutol and PBS, or rapamycin diluted in 10% PEG, 17% Tween-80. Mice were imaged again at 5-6 hrs, and 24 hrs after drug injection. Mice were sacrificed and spleens were removed for FACS analysis. FIG. 78A provides the results of BLI assays. Mice were imaged for firefly luciferase-derived bioluminescence by IVIS. Mice were imaged at the indicated time points relative to administration of drug or vehicle. Because rimiducid is specific for the F36V mutant of FKBP12 and the iC9 utilizes wild-type FKBP12, loss of radiance by T cell apoptosis is only observed with rimiducid treatment of the iC9 and not iC9 bearing animals. FIG. 78B provides a graphical representation of the average calculated radiance from FIG. 78A. FIG. 78C provides data showing the results of independent quantitative analyses of the in vivo assays of FIG. 78A. Human T cells in mice spleens were isolated and single-cell suspensions were made by lysing red cells with ammonia chloride/potassium (ACK)-based lysis buffer followed by mechanical dissociation through a 70-μm nylon filter. Cells were subsequently stained with the following antibodies: anti-hCD3-PerCP.Cy5.5, anti-hCD19-APC, and anti-mCD45RA-BV510. Human T cell counts were normalized to the number of mouse CD45 expressing cells present in the spleen preparations.

[0860] FIG. 79 provides the results of dose responsiveness assays of the rapamycin induced iC9 apoptotic switch in a whole animal model. 1.0×10⁷ T cells transduced with BP1385 (containing iRC9) and with a GFP-luciferase vector were implanted intravenously into 8-week-old female, immune-deficient mice (NOD.CgPrkdc^{scid}II2rg^{tm1Wjl}/SzJ; NSG). Mice were subjected to IVIS imaging ˜4 hrs after T cell injection (−24 hrs post-drug administration). The following day, mice were imaged just before drug injection (0 hrs), then injected IP with vehicle, rimiducid diluted in solutol and PBS or rapamycin diluted in 5% PEG, 2.5% Tween-80 at the step-log dilutions from 10 mg/kg body weight. Mice were imaged again at 5-6 hrs, and 24 hrs after drug injection. Mice were sacrificed and spleens were removed for FACS analysis. FIG. 79A provides a pictoral representation of BL1 imaging. FIG. 79B provides a graphical representation of the average calculated radiance from FIG. 79A. FIG. 79C provides graphs of the number of human T cells in spleens at termination (24 hours). Left panel shows total number of human (murine(m)CD45⁻CD3⁺) that are marked with CD19 indicating presence of the apoptotic switch. Middle panel shows the mean fluorescence intensity for the CD19 marker in the human T cells remaining in the spleen. Right panel shows the total number of human T cells with detectable iC9 (via CD19 epitope). *=p<0.05 by Student's T test. FIG. 79D provides graphs of vector copy number (VCN) determined by qPCR from DNA derived from spleen. Primers were chosen specific for iMC (left panel, a negative control in this experiment) or iCaspase-9 and GFP-luc (middle and right panels).

### Example 27: A Dual-Switch Platform to Control CAR-T Cell Efficacy and Safety with Two Independent, Non-Toxic Chemical Inducers of Protein Dimerization

[0861] The present example discusses the use of a single retroviral vector to express an iRMC polypeptide, a first generation CAR, and an iC9 safety switch. For this example, a rapalog, C7-isobutyloxyrapamycin (Ibu-Rap) was used to induce MC activity. It is understood that wild type FRB and rapamycin may also be used in the present example. Also, for this example, the iRMC comprised a modified FRB polypeptide, called FRB_{KLW} or “KLW”. In other examples of the present technology, the iRC9 and iRMC polypeptides may comprise modified FRB polypolyptides rather than the wild type FRBs provided herein. Also, various rapalogs that bind to the wild type or modified FRB polypeptides may be used to activate iRC9 or iRMC.

[0862] Chimeric Antigen Receptor (CAR) T cell strategies have demonstrated effectiveness against multiple disseminated cancers, but solid tumors remain a challenge. To improve efficacy a platform was developed to separate tumor antigen-specific first generation CARs from a cytosolic costimulatory component, iRMC, regulated by a non-immunosuppressive analog of rapamycin, C7-isobutyloxyrapamycin (IBuRap). To mitigate the risk of off-tumor cytotoxicity or excessive cytokine release, iRMC was combined with the Caspase-9-based switch, iC9, directing rapid T cell apoptosis by rimiducid-regulated homodimerization and activation.

[0863] To produce a non-immunosuppressive rapamycin analog (rapalog), the acid-sensitive C7-methoxy group was replaced with an isobutyloxy moiety. The added bulk of this ‘bump’ reduced affinity and inhibition for mTOR/TORC1 but retained subnanomolar affinity for a mutant FKBP-Rapamycin

[0864] Binding (FRB) domain, termed KLW, derived from mTOR. KLW was fused in-tandem with wild-type FKBP12 and the costimulatory signaling domains MyD88 and CD40 to create iRMC. NF-κB activity was stimulated in a robust and dose-dependent fashion (EC₅₀<1 nM) with iBuRap. When incorporated into a retroviral (iRMC-2A-iC9-2A-CAR) format and incubated with CAR-specific tumor cells, IBuRAP addition stimulated T cell proliferation, cytokine production and dose-dependent tumor cell killing. In 7-day cocultures, rapalog/iRMC-stimulated HER2-specific iRMC-2A-iC9-2A-CAR T cells preferentially proliferated, leading to elimination of >90% of SKBR3 breast carcinoma cells (E:T, 1:1), SKOV3 ovarian carcinoma (E:T, 1:5), or HPAC (E:T, 1:15) pancreatic carcinoma cells. If rimiducid was included in iRMC-2A-iC9-2A-CAR-T cultures, T cell apoptosis was rapidly induced (T_{1/2}=6 hours for microscopic observation of fluorescent caspase-3 substrate). Despite the fact that both iRMC and iC9 incorporated FKBP12 domains, because rimiducid is highly specific for the F36V variant of FKBP12, the costimulatory and safety switches are orthogonally regulated.

### Example 28: Dual-Switches to Target Solid Tumors

[0865] The present example discusses the use of a two retroviral vectors, where the first vector expresses an iMC and a first generation CAR, and the second vector expresses a iRC9 safety switch.

[0866] While chimeric antigen receptor (CAR) T immunotherapies have shown remarkable efficacy against leukemias and lymphomas, improved CAR-T efficacy and persistence without compromising safety are needed to overcome solid tumors. Two independently regulated molecular switches were developed that can elicit specific and rapid induction of cellular responses upon exposure to their cognate ligands. Cell activation is controlled by the homodimerizer rimiducid that triggers signaling cascades downstream of MyD88 and CD40 (iMC). A rapamycin-controlled pro-apoptotic switch is co-expressed, which induces dimerization of caspase-9 to mitigate possible toxicity from excessive CAR-T function (iRC9). When combined with a first generation CAR, these molecular switches allow for specific and efficient regulation of engineered T cells.

[0867] T cells were activated and co-transduced with the “iMC+CARζ”, SFG-iMC-2A-CAR.ζ vector, and a iC9-X vector, SFG-FRB.FKBP12.C9-2A-ΔCD19 to create a CombiCAR. The observed rapid kinetics and ˜95% efficiency of rapamycin-dependent cell death was determined by caspase-3 activation and annexin V conversion. In vivo assessment of iC9-X functionality was performed with EGFPluciferase (EGFPluc)-labeled T cells in NSG mice, showing that rapamycin treatment caused cell death in 90% of iRMC-containing T cells within 24 hours, similar to clinically validated rimiducid-regulated iC9.

[0868] iMC costimulation was further evaluated in a 7-day tumor cell coculture by cytokine production, T cell growth and tumor cell killing. Addition of iC9-X did not deleteriously affect antitumor efficacy of rimiducid-treated iMC-containing CAR-T cells, which eliminated OE-19 esophageal tumor cells in a coculture assay at a 1:20 effector to target ratio (3.9±4.3% OE19-GFP.Ffluc cells remained in iMC+CARζ-modified cultures 1.1±0.1% for CombiCAR), or T cell expansion (53.4±9.4% CAR⁺ for iMC+CARζ vs 44.6±13.2% for CombiCAR). In vivo efficacy of the CombiCAR-T cells was evaluated weekly in NSG mice implanted with EGFPluc-marked tumor burden and for T cell persistence via a Renilla luciferase marker. When challenged in a OE9 tumor-bearing mouse model, anti-HER2 dual-switch T cells controlled tumor growth in a rimiducid-dependent manner, which was representative of multiple tumor models.

[0869] The dual-switch platform comprising separate ligand dependent activation and apoptosis and a first generation CAR, efficiently controlled T cell growth and tumor elimination when costimulation was provided via systemic administration of rimiducid. Deployment of iC9-X results in rapid and efficient elimination of CombiCAR-T cells, providing a user-controlled system for managing persistence and safety of tumor antigen-specific CAR-T cells.

### Example 29: Dual-Switches to Activate Recombinant TCR-Expressing Cells

[0870] The present example discusses the use of a two retroviral vectors, where the first vector expresses an iMC and a recombinant TCR directed against PRAME, and the second vector expresses a iRC9 safety switch.

[0871] T cells engineered to express the α and β chains of antigen-specific T cell receptors (TCRs) have shown promise as a cancer immunotherapy treatment; however, durable responses have been limited by poor persistence of gene-modified T cells. Additionally, severe toxicities, including patient deaths, have occurred upon infusion of large numbers of TCR-modified T cells. To enhance T cell persistence while providing a safeguard against life-threatening toxicity, a dual-switch αβ TCR platform was developed that uses a rapamycin (Rap)-induced caspase-9 (iRC9) together with a rimiducid (Rim)-controlled activation switch, inducible MyD88/CD40 (iMC).

[0872] The αβ TCR sequence derived from an HLA-A2-restricted, PRAME-specific T cell clone was synthesized and placed in-frame with iMC, comprising signaling domains from MyD88 and CD40 fused to tandem Rim-binding mutant FKBP12v36 domains to generate the iMC-PRAME TCR. Caspase-9 was fused to FRB and wild-type FKBP domains and cloned in-frame with a selectable marker, truncated CD19 (ΔCD19) to generate iRC9-ΔCD19 retrovirus. All modules were separated by 2A polypeptide sequences. Activated human T cells were dual-transduced with iMC-PRAME TCR and iRC9-ΔCD19 viruses and subsequently enriched for CD19 expression using magnetic columns. iMC and iRC9 were activated by exposing transduced T cells to 10 nM Rim or Rap, respectively. Proliferation, cytokine production and cytotoxicity of TCR-modified T cells were assessed in co-culture assays with U266 (myeloma) and THP-1 (AML) cells in presence or absence of inducible ligands.

[0873] T cells transduced with iMC-PRAME TCR and iRC9-ΔCD19 showed efficient and stable expression for TCR and ΔCD19 post-CD19 selection (82±9% CD3⁺ Vβ1⁺, 96±2% CD3⁺CD19⁺). In coculture assays, dual-switch PRAME TCR demonstrated specific lysis of HLA-A2⁺PRAME⁺THP-1 and U266 tumor cells compared to an irrelevant TCR (CMVpp65) with or without iMC activation. However, Rim exposure induced a 42-fold induction of IL-2 (9±0.3 versus 385±180 μg/ml IL-2) and resulted in 13-fold expansion of TCR-modified T cells. The expression of iRC9 did not interfere with TCR function, nor with the synergy between TCR and iMC activation. Further, exposure to Rap triggered rapid apoptosis of dual-switch TCR-modified T cells (72±5% Annexin-V⁺ with Rap versus 14±4% without drug) indicating that the suicide switch is also functional.

[0874] iMC utilizes rimiducid to provide costimulation to TCR-engineered T cells. In addition, iRC9 is provides a rapamycin-inducible suicide switch that can eliminate T cells in case of severe toxicity. This iMC-enhanced iRC9-incorporating TCR is a prototype of novel dual-switch TCR-engineered T cell therapies that may increase efficacy, durability and safety of adoptive T cell therapies.

[0875] The following Appendices provide sequences and and plasmids referred to in Examples provided herein:

APPENDIX 18
pBP1293--pSFG-iMC.T2A-αhCD33(My9.6).ζ

| | | SEQ ID | | SEQ ID |
|---|---|---|---|---|
| Fragment | Nucleotide | NO: | Peptide | NO: |
| MyD88 | atggctgcaggaggtcccggcgcggggtctgcggcc | 1663 | MAAGGPGAGSAAPVSSTSSLPLAALN | 1664 |
| | ccggtctcctccacatcctcccttcccctggctgctctca | | MRVRRRLSLFLNVRTQVAADWTALAEE | |
| | acatgcgagtgcggcgccgcctgtctctgttcttgaacg | | MDFEYLEIRQLETQADPTGRLLDAWQG | |
| | tgcggacacaggtggcggccgactggaccgcgctgg | | RPGASVGRLLDLLTKLGRDDVLLELGP | |
| | cggaggagatggactttgagtacttggagatccggca | | SIEEDCQKYILKQQQEEAEKPLQVAAVD | |
| | actggagacacaagcggaccccactggcaggctgct | | SSVPRTAELAGITTLDDPLGHMPERFDA | |
| | ggacgcctggcagggacgccctggcgcctctgtagg | | FICYCPSDI | |
| | ccgactgctcgatctgcttaccaagctgggccgcgacg | | | |
| | acgtgctgctggagctgggacccagcattgaggagg | | | |
| | attgccaaaagtatatcttgaagcagcagcaggagga | | | |
| | ggctgagaagcctttacaggtggccgctgtagacagc | | | |
| | agtgtcccacggacagcagagctggcgggcatcacc | | | |
| | acacttgatgaccccctggggcatatgcctgagcgtttc | | | |
| | gatgccttcatctgctattgccccagcgacatc | | | |
| Linker | gtcgag | 1665 | VE | 1666 |
| CD40 | aaaaaggtggccaagaagccaaccaataaggcccc | 1667 | KKVAKKPTNKAPHPKQEPQEINFPDDL | 1668 |
| | ccaccccaagcaggagccccaggagatcaattttccc | | PGSNTAAPVQETLHGCQPVTQEDGKE | |
| | gacgatcttcctggctccaacactgctgctccagtgcag | | SRISVQERQ | |
| | gagactttacatggatgccaaccggtcacccaggagg | | | |
| | atggcaaagagagtcgcatctcagtgcaggagagac | | | |
| | ag | | | |
| Linker | gtcgag | 1669 | VE | 1670 |
| FKBPᵥ′ | ggcgtccaagtcgaaaccattagtcccggcgatggca | 1671 | GVQVETISPGDGRTFPKRGQTCVVHYT | 1672 |
| | gaacatttcctaaaaggggacaaacatgtgtcgtccat | | GMLEDGKKVDSSRDRNKPFKFMLGKQ | |
| | tatacaggcatgttggaggacggcaaaaaggtggac | | EVIRGWEEGVAQMSVGQRAKLTISPDY | |
| | agtagtaGaGAtcGcAAtAAaCCtTTcAAaTT | | AYGATGHPGIIPPHATLVFDVELLKLE | |
| | cATGtTgGGaAAaCAaGAaGTcATtaGgG | | | |
| | GaTGGGAgGAgGGcGTgGCtCAaATGtc | | | |
| | cGTcGGcCAacGcGCtAAgCTcACcATcag | | | |
| | cCCcGAcTAcGCaTAcGGcGCtACcGGa | | | |
| | CAtCCcGGaATtATtCCcCCtCAcGCtACct | | | |
| | TgGTgTTtGAcGTcGAaCTgtTgAAgCTcG | | | |
| | Aa | | | |
| Linker | gtcgag | 1673 | VE | 1674 |
| FKBPᵥ | ggagtgcaggtggagactatctccccaggagacggg | 1675 | GVQVETISPGDGRTFPKRGQTCVVHYT | 1676 |
| | cgcaccttccccaagcgcggccagacctgcgtggtgc | | GMLEDGKKVDSSRDRNKPFKFMLGKQ | |
| | actacaccgggatgcttgaagatggaaagaaagttga | | EVIRGWEEGVAQMSVGQRAKLTISPDY | |
| | ttcctcccgggacagaaacaagccctttaagtttatgct | | AYGATGHPGIIPPHATLVFDVELLKLE | |
| | aggcaagcaggaggtgatccgaggctgggaagaag | | | |
| | gggttgcccagatgagtgtgggtcagagagccaaact | | | |
| | gactatatctccagattatgcctatggtgccactgggca | | | |
| | cccaggcatcatcccaccacatgccactctcgtcttcg | | | |
| | atgtggagcttctaaaactggaa | | | |
| Linker | ccgcGG | 1677 | PR | 1678 |
| T2A | GAGGGCAGAGGCAGCCTCCTGACAT | 1679 | EGRGSLLTCGDVEENPGP | 1680 |
| | GTGGGGACGTCGAGGAGAACCCTGG | | | |
| | CCCA | | | |
| Linker | CCTTGG | 1681 | PW | 1682 |
| Signal Peptide | ATGGAGTTCGGATTGAGCTGGCTGTT | 1683 | MEFGLSWLFLVAILKGVQCSR | 1684 |
| | CCTGGTGGCAATACTCAAGGGCGTTC | | | |
| | AATGTTCACGG | | | |
| My9-6 VL | GAAATTGTGCTGACTCAGAGCCCGGG | 1685 | EIVLTQSPGSLAVSPGERVTMSCKSSQ | 1686 |
| | TAGCCTGGCCGTGTCCCCCGGAGAG | | SVFFSSSQKNYLAVVYQQIPGQSPRLLIY | |
| | CGAGTGACCATGAGCTGTAAATCCAG | | WASTRESGVPDRFTGSGSGTDFTLTIS | |
| | CCAATCAGTTTTTTTTTCATCATCTCAA | | SVQPEDLAIYYCHQYLSSRTFGQGTKL | |
| | AAAAACTATCTGGCATGGTACCAACA | | EIKR | |
| | GATACCCGGGCAGTCCCCACGGCTG | | | |
| | CTGATTTACTGGGCATCAACACGCGA | | | |
| | GAGCGGTGTGCCCGACAGATTCACC | | | |
| | GGAAGCGGGAGCGGCACGGACTTCA | | | |
| | CACTTACCATCTCAAGCGTACAACCG | | | |
| | GAGGACTTGGCTATCTATTACTGCCA | | | |
| | CCAATATCTTTCCTCCAGAACATTCGG | | | |
| | ACAGGGAACGAAACTGGAGATCAAAA | | | |
| | GA | | | |
| Flex | GGCGGCGGGAGTGGGGGAGGAGGT | 1687 | gggsgggg | 1688 |
| Linker | CAGGTG | 1689 | qv | 1690 |
| My9-6 VH | CAGGTGCAGCTGCAGCAGCCTGGAG | 1691 | QVQLQQPGAEVVKPGASVKMSCKASG | 1692 |
| | CCGAGGTGGTGAAGCCCGGCGCATC | | YTFTSYYIHWIKQTPGQGLEWVGVIYPG | |
| | TGTGAAAATGTCTTGCAAGGCAAGCG | | NDDISYNQKFQGKATLTADKSSTTAYM | |
| | GATATACATTTACTAGCTACTACATCC | | QLSSLTSEDSAVYYCAREVRLRYFDVW | |
| | ATTGGATCAAGCAAACCCCCGGACAG | | GQGTTVTVSS | |
| | GGCCTCGAATGGGTGGGAGTTATTTA | | | |
| | CCCGGGGAACGATGATATCTCTTATA | | | |
| | ATCAGAAATTCCAAGGGAAAGCCACC | | | |
| | CTGACTGCAGACAAATCAAGTACCAC | | | |
| | AGCCTATATGCAGCTCAGCTCCCTGA | | | |
| | CAAGCGAGGATTCCGCTGTGTACTAC | | | |
| | TGTGCCAGGGAGGTTAGACTTCGATA | | | |
| | TTTTGATGTTTGGGGGCAGGGAACTA | | | |
| | CCGTGACCGTGAGCAGC | | | |
| Linker | GGCTCC | 1693 | gs | 1694 |
| C034 epitope | GAGCTGCCAACCCAGGGAACTTTTTC | 1695 | ELPTQGTFSNVSTNVS | 1696 |
| | AAATGTATCAACTAACGTCTCA | | | |
| CD8 stalk | CCCGCGCCACGACCACCAACACCAG | 1697 | PAPRPPTPAPTIASQPLSLRPEACRPAA | 1698 |
| | CCCCAACCATTGCATCCCAGCCTTTG | | GGAVHTRGLDFACD | |
| | TCTCTCCGGCCCGAGGCTTGTCGCCC | | | |
| | CGCCGCCGGGGGTGCCGTCCATACC | | | |
| | CGAGGCCTGGACTTCGCCTGCGAT | | | |
| CD8 transmembrane | ATATATATTTGGGCTCCTCTGGCCGG | 1699 | IYIWAPLAGTCGVLLLSLVITLYCNHRNR | 1700 |
| | TACCTGCGGCGTACTGCTCCTGTCAC | | RRVCKCPR | |
| | TGGTAATAACCCTGTATTGCAATCACA | | | |
| | GGAACAGAAGGAGAGTCTGTAAGTGC | | | |
| | CCCCGC | | | |
| Linker | GTCGAC | 1701 | VD | 1702 |
| CD3ζ | AGAGTGAAGTTCAGCAGGAGCGCAG | 1703 | RVKFSRSADAPAYQQGQNQLYNELNL | 1704 |
| | ACGCCCCCGCGTACCAGCAGGGCCA | | GRREEYDVLDKRRGRDPEMGGKPRRK | |
| | GAACCAGCTCTATAACGAGCTCAATC | | NPQEGLYNELQKDKMAEAYSEIGMKGE | |
| | TAGGACGAAGAGAGGAGTACGATGTT | | RRRGKGHDGLYQGLSTATKDTYDALH | |
| | TTGGACAAGAGACGTGGCCGGGACC | | MQALPPR | |
| | CTGAGATGGGGGGAAAGCCGAGAAG | | | |
| | GAAGAACCCTCAGGAAGGCCTGTACA | | | |
| | ATGAACTGCAGAAAGATAAGATGGCG | | | |
| | GAGGCCTACAGTGAGATTGGGATGAA | | | |
| | AGGCGAGCGCCGGAGGGGCAAGGG | | | |
| | GCACGATGGCCTTTACCAGGGTCTCA | | | |
| | GTACAGCCACCAAGGACACCTACGAC | | | |
| | GCCCTTCACATGCAAGCTCTTCCACC | | | |
| | TCGT | | | |
| STOP | TGA | 1705 | stop | |

APPENDIX 19
pBP1296--pSFG-iMC.T2A-αhCD123(32716).ζ

| | | SEQ | | SEQ |
|---|---|---|---|---|
| Frag- | | ID | | ID |
| ment | Nucleotide | NO: | Peptide | NO: |
| MyD88 | atggctgcaggaggtcccggcgcggggtctgcggcc | 1706 | MAAGGPGAGSAAPVSSTSSLPLAALN | 1707 |
| | ccggtctcctccacatcctcccttcccctggctgctctca | | MRVRRRLSLFLNVRTQVAADWTALAEE | |
| | acatgcgagtgcggcgccgcctgtctctgttcttgaacg | | MDFEYLEIRQLETQADPTGRLLDAWQG | |
| | tgcggacacaggtggcggccgactggaccgcgctgg | | RPGASVGRLLDLLTKLGRDDVLLELGP | |
| | cggaggagatggactttgagtacttggagatccggca | | SIEEDCQKYILKQQQEEAEKPLQVAAVD | |
| | actggagacacaagcggaccccactggcaggctgct | | SSVPRTAELAGITTLDDPLGHMPERFDA | |
| | ggacgcctggcagggacgccctggcgcctctgtagg | | FICYCPSDI | |
| | ccgactgctcgatctgcttaccaagctgggccgcgacg | | | |
| | acgtgctgctggagctgggacccagcattgaggagg | | | |
| | attgccaaaagtatatcttgaagcagcagcaggagga | | | |
| | ggctgagaagcctttacaggtggccgctgtagacagc | | | |
| | agtgtcccacggacagcagagctggcgggcatcacc | | | |
| | acacttgatgaccccctggggcatatgcctgagcgtttc | | | |
| | gatgccttcatctgctattgccccagcgacatc | | | |
| Linker | gtcgag | 1708 | VE | 1709 |
| CD40 | aaaaaggtggccaagaagccaaccaataaggcccc | 1710 | KKVAKKPTNKAPHPKQEPQEINFPDDL | 1711 |
| | ccaccccaagcaggagccccaggagatcaattttccc | | PGSNTAAPVQETLHGCQPVTQEDGKE | |
| | gacgatcttcctggctccaacactgctgctccagtgcag | | SRISVQERQ | |
| | gagactttacatggatgccaaccggtcacccaggagg | | | |
| | atggcaaagagagtcgcatctcagtgcaggagagac | | | |
| | ag | | | |
| Linker | gtcgag | 1712 | VE | 1713 |
| FKBPᵥ′ | ggcgtccaagtcgaaaccattagtcccggcgatggca | 1714 | GVQVETISPGDGRTFPKRGQTCVVHYT | 1715 |
| | gaacatttcctaaaaggggacaaacatgtgtcgtccat | | GMLEDGKKVDSSRDRNKPFKFMLGKQ | |
| | tatacaggcatgttggaggacggcaaaaaggtggac | | EVIRGWEEGVAQMSVGQRAKLTISPDY | |
| | agtagtaGaGAtcGcAAtAAaCCtTTcAAaTT | | AYGATGHPGIIPPHATLVFDVELLKLE | |
| | cATGtTgGGaAAaCAaGAaGTcATtaGgG | | | |
| | GaTGGGAgGAgGGcGTgGCtCAaATGtc | | | |
| | cGTcGGcCAacGcGCtAAgCTcACcATcag | | | |
| | cCCcGAcTAcGCaTAcGGcGCtACcGGa | | | |
| | CAtCCcGGaATtATtCCcCCtCAcGCtACct | | | |
| | TgGTgTTtGAcGTcGAaCTgtTgAAgCTcG | | | |
| | Aa | | | |
| Linker | gtcgag | 1716 | VE | 1717 |
| FKBPᵥ | ggagtgcaggtggagactatctccccaggagacggg | 1718 | GVQVETISPGDGRTFPKRGQTCVVHYT | 1719 |
| | cgcaccttccccaagcgcggccagacctgcgtggtgc | | GMLEDGKKVDSSRDRNKPFKFMLGKQ | |
| | actacaccgggatgcttgaagatggaaagaaagttga | | EVIRGWEEGVAQMSVGQRAKLTISPDY | |
| | ttcctcccgggacagaaacaagccctttaagtttatgct | | AYGATGHPGIIPPHATLVFDVELLKLE | |
| | aggcaagcaggaggtgatccgaggctgggaagaag | | | |
| | gggttgcccagatgagtgtgggtcagagagccaaact | | | |
| | gactatatctccagattatgcctatggtgccactgggca | | | |
| | cccaggcatcatcccaccacatgccactctcgtcttcg | | | |
| | atgtggagcttctaaaactggaa | | | |
| Linker | CCGCGG | 1720 | PR | 1721 |
| T2A | GAGGGCAGAGGCAGCCTCCTGACAT | 1722 | EGRGSLLTCGDVEENPGP | 1723 |
| | GTGGGGACGTCGAGGAGAACCCTGG | | | |
| | CCCA | | | |
| Linker | CCTTGG | 1724 | PW | 1725 |
| Signal | ATGGAGTTCGGATTGAGCTGGCTGTT | 1726 | MEFGLSWLFLVAILKGVQCSR | 1727 |
| Peptide | CCTGGTGGCAATACTCAAGGGCGTTC | | | |
| | AATGTTCACGG | | | |
| CD123 | CAGATCCAACTGGTGCAGTCAGGCCC | 1728 | QIQLVQSGPELKKPGETVKISCKASGYI | 1729 |
| (32716) | GGAACTGAAGAAGCCAGGGGAGACA | | FTNYGMNWVKQAPGKSFKWMGWINT | |
| VH | GTCAAAATAAGTTGTAAAGCCAGCGG | | YTGESTYSADFKGRFAFSLETSASTAYL | |
| | CTACATATTTACTAATTACGGGATGAA | | HINDLKNEDTATYFCARSGGYDPMDY | |
| | TTGGGTGAAGCAAGCGCCGGGCAAA | | WGQGTSVTV | |
| | TCCTTTAAATGGATGGGGTGGATAAA | | | |
| | CACATACACAGGAGAGTCAACGTACA | | | |
| | GCGCGGACTTCAAAGGTCGATTCGCG | | | |
| | TTCAGTCTCGAGACCAGCGCGAGTAC | | | |
| | AGCTTACCTCCACATCAACGATCTTAA | | | |
| | AAACGAAGACACGGCAACCTATTTTT | | | |
| | GCGCCCGGTCAGGCGGTTACGACCC | | | |
| | TATGGACTATTGGGGCCAAGGGACCT | | | |
| | CCGTTACGGTA | | | |
| Flex | TCTTCAGGCGGTGGCGGGAGTGGTG | 1730 | SSGGGGSGGGGSGGGGS | 1731 |
| | GAGGAGGCTCAGGCGGCGGGGGATC | | | |
| | A | | | |
| CD123 | GACATCGTACTGACCCAATCTCCCGC | 1732 | DIVLTQSPASLAVSLGQRATISCRASES | 1733 |
| (32716) | TAGCCTTGCAGTATCCTTGGGTCAAC | | VDNYGNTFMHWYQQKPGQPPKLLIYR | |
| VL | GCGCTACAATAAGTTGCCGGGCTAGT | | ASNLESGIPARFSGSGSRTDFTLTINPV | |
| | GAGTCCGTAGACAACTATGGCAACAC | | EADDVATYYCQQSNEDPPTFGAGTKLE | |
| | CTTCATGCATTGGTACCAACAAAAACC | | LKESKYGPPCP | |
| | AGGTCAGCCACCCAAACTTCTCATTTA | | | |
| | CAGAGCGTCTAATCTCGAAAGCGGCA | | | |
| | TCCCTGCTCGATTCTCTGGAAGCGGA | | | |
| | AGTAGAACCGACTTTACACTGACTATA | | | |
| | AACCCCGTCGAAGCCGATGATGTTGC | | | |
| | CACTTATTACTGTCAACAGAGCAATGA | | | |
| | GGACCCACCGACATTCGGTGCTGGTA | | | |
| | CCAAGCTGGAGTTGAAGGAGTCAAAA | | | |
| | TACGGGCCTCCCTGTCCC | | | |
| Linker | GGCTCC | 1734 | gs | 1735 |
| CD34 | GAGCTGCCAACCCAGGGAACTTTTTC | 1736 | ELPTQGTFSNVSTNVS | 1737 |
| epitope | AAATGTATCAACTAACGTCTCA | | | |
| CD8 | CCCGCGCCACGACCACCAACACCAG | 1738 | PAPRPPTPAPTIASQPLSLRPEACRPAA | 1739 |
| stalk | CCCCAACCATTGCATCCCAGCCTTTG | | GGAVHTRGLDFACD | |
| | TCTCTCCGGCCCGAGGCTTGTCGCCC | | | |
| | CGCCGCCGGGGGTGCCGTCCATACC | | | |
| | CGAGGCCTGGACTTCGCCTGCGAT | | | |
| CD8 | ATATATATTTGGGCTCCTCTGGCCGG | 1740 | IYIWAPLAGTCGVLLLSLVITLYCNHRN | 1741 |
| trans- | TACCTGCGGCGTACTGCTCCTGTCAC | | RRRVCKCPR | |
| mem- | TGGTAATAACCCTGTATTGCAATCACA | | | |
| brane | GGAACAGAAGGAGAGTCTGTAAGTGC | | | |
| | CCCCGC | | | |
| Linker | GTCGAC | 1742 | VD | 1743 |
| CD3ζ | AGAGTGAAGTTCAGCAGGAGCGCAG | 1744 | RVKFSRSADAPAYQQGQNQLYNELNL | 1745 |
| | ACGCCCCCGCGTACCAGCAGGGCCA | | GRREEYDVLDKRRGRDPEMGGKPRRK | |
| | GAACCAGCTCTATAACGAGCTCAATC | | NPQEGLYNELQKDKMAEAYSEIGMKGE | |
| | TAGGACGAAGAGAGGAGTACGATGTT | | RRRGKGHDGLYQGLSTATKDTYDALH | |
| | TTGGACAAGAGACGTGGCCGGGACC | | MQALPPR | |
| | CTGAGATGGGGGGAAAGCCGAGAAG | | | |
| | GAAGAACCCTCAGGAAGGCCTGTACA | | | |
| | ATGAACTGCAGAAAGATAAGATGGCG | | | |
| | GAGGCCTACAGTGAGATTGGGATGAA | | | |
| | AGGCGAGCGCCGGAGGGGCAAGGG | | | |
| | GCACGATGGCCTTTACCAGGGTCTCA | | | |
| | GTACAGCCACCAAGGACACCTACGAC | | | |
| | GCCCTTCACATGCAAGCTCTTCCACC | | | |
| | TCGT | | | |
| STOP | TGA | 1746 | stop | |

APPENDIX 20
pBP1327--pSFG-FRB.FKBPᵥ.ΔC9.2A-ΔCD19

| | | SEQ ID | | SEQ ID |
|---|---|---|---|---|
| Fragment | Nucleotide | NO: | Peptide | NO: |
| FRB | gaaatgTGGCATGAAGGGTTGGAAGAA | 1747 | EMWHEGLEEASRLYFGERNVKGMFEV | 1748 |
| | GCTTCAAGGCTGTACTTCGGAGAGAG | | LEPLHAMMERGPQTLKETSFNQAYGR | |
| | GAACGTGAAGGGCATGTTTGAGGTTC | | DLMEAQEWCRKYMKSGNVKDLTQAW | |
| | TTGAACCTCTGCACGCCATGATGGAA | | DLYYHVFRRISK | |
| | CGGGGACCGCAGACACTGAAAGAAA | | | |
| | CCTCTTTTAATCAGGCCTACGGCAGA | | | |
| | GACCTGATGGAGGCCCAAGAATGGT | | | |
| | GTAGAAAGTATATGAAATCCGGTAAC | | | |
| | GTGAAAGACCTGactCAGGCCTGGGA | | | |
| | CCTTTATTACCATGTGTTCAGGCGGAT | | | |
| | CAGTAAG | | | |
| Linker | TCAGGCGGTGGCTCAGGT | 1749 | SGGGSG | 1750 |
| FKBPᵥ | GGcGTcCAaGTcGAaACcATtagtCCcGG | 1751 | GVQVETISPGDGRTFPKRGQTCVVHYT | 1752 |
| | cGAtGGcaGaACaTTtCCtAAaaGgGGaC | | GMLEDGKKVDSSRDRNKPFKFMLGKQ | |
| | AaACaTGtGTcGTcCAtTAtACaGGcATGt | | EVIRGWEEGVAQMSVGQRAKLTISPDY | |
| | TgGAgGAcGGcAAaAAggTCGAcagtagta | | AYGATGHPGIIPPHATLVFDVELLKL | |
| | GaGAtcGcAAtAAaCCtTTcAAaTTcATGtT | | | |
| | gGGaAAaCAaGAaGTcATtaGgGGaTGG | | | |
| | GAgGAgGGcGTgGCtCAaATGtccGTcG | | | |
| | GcCAacGcGCtAAgCTcACcATcagcCCc | | | |
| | GAcTAcGCaTAcGGcGCtACcGGaCAtC | | | |
| | CcggaattATtCCcCCtCAcGCtACctTgGTg | | | |
| | TTtGAcGTcGAaCTgtTgAAgCTc | | | |
| Linker | TCGGGGGGCGGATCAGG | 1753 | SGGGS | 1754 |
| Δcaspase9 | GTCGACGGATTTGGTGATGTCGGTGC | 1755 | VDGFGDVGALESLRGNADLAYILSMEP | 1756 |
| | TCTTGAGAGTTTGAGGGGAAATGCAG | | CGHCLIINNVNFCRESGLRTRTGSNIDC | |
| | ATTTGGCTTACATCCTGAGCATGGAG | | EKLRRRFSSLHFMVEVKGDLTAKKMVL | |
| | CCCTGTGGCCACTGCCTCATTATCAA | | ALLELARQDHGALDCCVVVILSHGCQA | |
| | CAATGTGAACTTCTGCCGTGAGTCCG | | SHLQFPGAVYGTDGCPVSVEKIVNIFNG | |
| | GGCTCCGCACCCGCACTGGCTCCAA | | TSCPSLGGKPKLFFIQACGGEQKDHGF | |
| | CATCGACTGTGAGAAGTTGCGGCGTC | | EVASTSPEDESPGSNPEPDATPFQEGL | |
| | GCTTCTCCTCGCTGCATTTCATGGTG | | RTFDQLDAISSLPTPSDIFVSYSTFPGFV | |
| | GAGGTGAAGGGCGACCTGACTGCCA | | SWRDPKSGSWYVETLDDIFEQWAHSE | |
| | AGAAAATGGTGCTGGCTTTGCTGGAG | | DLQSLLLRVANAVSVKGIYKQMPGCFN | |
| | CTGGCGCgGCAGGACCACGGTGCTC | | FLRKKLFFKTSASRA | |
| | TGGACTGCTGCGTGGTGGTCATTCTC | | | |
| | TCTCACGGCTGTCAGGCCAGCCACCT | | | |
| | GCAGTTCCCAGGGGCTGTCTACGGC | | | |
| | ACAGATGGATGCCCTGTGTCGGTCGA | | | |
| | GAAGATTGTGAACATCTTCAATGGGA | | | |
| | CCAGCTGCCCCAGCCTGGGAGGGAA | | | |
| | GCCCAAGCTCTTTTTCATCCAGGCCT | | | |
| | GTGGTGGGGAGCAGAAAGACCATGG | | | |
| | GTTTGAGGTGGCCTCCACTTCCCCTG | | | |
| | AAGACGAGTCCCCTGGCAGTAACCCC | | | |
| | GAGCCAGATGCCACCCCGTTCCAGG | | | |
| | AAGGTTTGAGGACCTTCGACCAGCTG | | | |
| | GACGCCATATCTAGTTTGCCCACACC | | | |
| | CAGTGACATCTTTGTGTCCTACTCTAC | | | |
| | TTTCCCAGGTTTTGTTTCCTGGAGGG | | | |
| | ACCCCAAGAGTGGCTCCTGGTACGTT | | | |
| | GAGACCCTGGACGACATCTTTGAGCA | | | |
| | GTGGGCTCACTCTGAAGACCTGCAGT | | | |
| | CCCTCCTGCTTAGGGTCGCTAATGCT | | | |
| | GTTTCGGTGAAAGGGATTTATAAACA | | | |
| | GATGCCTGGTTGCTTTAATTTCCTCCG | | | |
| | GAAAAAACTTTTCTTTAAAACATCAGC | | | |
| | TAGCAGAGCC | | | |
| Linker | ccgcGG | 1757 | PR | 1758 |
| T2A | GAAGGCCGAGGGAGCCTGCTGACAT | 1759 | EGRGSLLTCGDVEENPGP | 1760 |
| | GTGGCGATGTGGAGGAAAACCCAGG | | | |
| | ACCA | | | |
| ΔCD19 | ATGCCACCACCTCGCCTGCTGTTCTT | 1761 | MPPPRLLFFLLFLTPMEVRPEEPLVVKV | 1762 |
| | TCTGCTGTTCCTGACACCTATGGAGG | | EEGDNAVLQCLKGTSDGPTQQLTWSR | |
| | TGCGACCTGAGGAACCACTGGTCGTG | | ESPLKPFLKLSLGLPGLGIHMRPLAIWL | |
| | AAGGTCGAGGAAGGCGACAATGCCG | | FIFNVSQQMGGFYLCQPGPPSEKAWQ | |
| | TGCTGCAGTGCCTGAAAGGCACTTCT | | PGWTVNVEGSGELFRWNVSDLGGLGC | |
| | GATGGGCCAACTCAGCAGCTGACCTG | | GLKNRSSEGPSSPSGKLMSPKLYVWA | |
| | GTCCAGGGAGTCTCCCCTGAAGCCTT | | KDRPEIWEGEPPCLPPRDSLNQSLSQD | |
| | TTCTGAAACTGAGCCTGGGACTGCCA | | LTMAPGSTLWLSCGVPPDSVSRGPLS | |
| | GGACTGGGAATCCACATGCGCCCTCT | | WTHVHPKGPKSLLSLELKDDRPARDM | |
| | GGCTATCTGGCTGTTCATCTTCAACG | | WVMETGLLLPRATAQDAGKYYCHRGN | |
| | TGAGCCAGCAGATGGGAGGATTCTAC | | LTMSFHLEITARPVLWHWLLRTGGWKV | |
| | CTGTGCCAGCCAGGACCACCATCCGA | | SAVTLAYLIFCLCSLVGILHLQRALVLRR | |
| | GAAGGCCTGGCAGCCTGGATGGACC | | KRKRMTDPTRRF | |
| | GTCAACGTGGAGGGGTCTGGAGAAC | | | |
| | TGTTTAGGTGGAATGTGAGTGACCTG | | | |
| | GGAGGACTGGGATGTGGGCTGAAGA | | | |
| | ACCGCTCCTCTGAAGGCCCAAGTTCA | | | |
| | CCCTCAGGGAAGCTGATGAGCCCAAA | | | |
| | ACTGTACGTGTGGGCCAAAGATCGGC | | | |
| | CCGAGATCTGGGAGGGAGAACCTCC | | | |
| | ATGCCTGCCACCTAGAGACAGCCTGA | | | |
| | ATCAGAGTCTGTCACAGGATCTGACA | | | |
| | ATGGCCCCCGGGTCCACTCTGTGGCT | | | |
| | GTCTTGTGGAGTCCCACCCGACAGCG | | | |
| | TGTCCAGAGGCCCTCTGTCCTGGACC | | | |
| | CACGTGCATCCTAAGGGGCCAAAAAG | | | |
| | TCTGCTGTCACTGGAACTGAAGGACG | | | |
| | ATCGGCCTGCCAGAGACATGTGGGTC | | | |
| | ATGGAGACTGGACTGCTGCTGCCACG | | | |
| | AGCAACCGCACAGGATGCTGGAAAAT | | | |
| | ACTATTGCCACCGGGGCAATCTGACA | | | |
| | ATGTCCTTCCATCTGGAGATCACTGC | | | |
| | AAGGCCCGTGCTGTGGCACTGGCTG | | | |
| | CTGCGAACCGGAGGATGGAAGGTCA | | | |
| | GTGCTGTGACACTGGCATATCTGATC | | | |
| | TTTTGCCTGTGCTCCCTGGTGGGCAT | | | |
| | TCTGCATCTGCAGAGAGCCCTGGTGC | | | |
| | TGCGGAGAAAGAGAAAGAGAATGACT | | | |
| | GACCCAACAAGAAGGTTT | | | |
| STOP | TGA | 1763 | stop | |

APPENDIX 21
pBP1328--pSFG-FKBPᵥ.FRB.ΔC9.2A-ΔCD19

| | | SEQ ID | | SEQ ID |
|---|---|---|---|---|
| Fragment | Nucleotide | NO: | Peptide | NO: |
| FKBPᵥ | GGcGTcCAaGTcGAaACcATtagtCCcGG | 1764 | GVQVETISPGDGRTFPKRGQTCVVHYT | 1765 |
| | cGAtGGcaGaACaTTtCCtAAaaGgGGaC | | GMLEDGKKVDSSRDRNKPFKFMLGKQ | |
| | AaACaTGtGTcGTcCAtTAtACaGGcATGt | | EVIRGWEEGVAQMSVGQRAKLTISPDY | |
| | TgGAgGAcGGcAAaAAggTCGAcagtagta | | AYGATGHPGIIPPHATLVFDVELLKL | |
| | GaGAtcGcAAtAAaCCtTTcAAaTTcATGtT | | | |
| | gGGaAAaCAaGAaGTcATtaGgGGaTGG | | | |
| | GAgGAgGGcGTgGCtCAaATGtccGTcG | | | |
| | GcCAacGcGCtAAgCTcACcATcagcCCc | | | |
| | GAcTAcGCaTAcGGcGCtACcGGaCAtC | | | |
| | CcggaattATtCCcCCtCAcGCtACctTgGTg | | | |
| | TTtGAcGTcGAaCTgtTgAAgCTc | | | |
| Linker | TCGGGGGGCGGATCAGG | 1766 | SGGGS | 1767 |
| FRB | gaaatgTGGCATGAAGGGTTGGAAGAA | 1768 | EMWHEGLEEASRLYFGERNVKGMFEV | 1769 |
| | GCTTCAAGGCTGTACTTCGGAGAGAG | | LEPLHAMMERGPQTLKETSFNQAYGR | |
| | GAACGTGAAGGGCATGTTTGAGGTTC | | DLMEAQEWCRKYMKSGNVKDLTQAW | |
| | TTGAACCTCTGCACGCCATGATGGAA | | DLYYHVFRRISK | |
| | CGGGGACCGCAGACACTGAAAGAAA | | | |
| | CCTCTTTTAATCAGGCCTACGGCAGA | | | |
| | GACCTGATGGAGGCCCAAGAATGGT | | | |
| | GTAGAAAGTATATGAAATCCGGTAAC | | | |
| | GTGAAAGACCTGactCAGGCCTGGGA | | | |
| | CCTTTATTACCATGTGTTCAGGCGGAT | | | |
| | CAGTAAG | | | |
| Linker | TCAGGCGGTGGCTCAGGT | 1770 | SGGGSG | 1771 |
| Δcaspase9 | GTCGACGGATTTGGTGATGTCGGTGC | 1772 | VDGFGDVGALESLRGNADLAYILSMEP | 1773 |
| | TCTTGAGAGTTTGAGGGGAAATGCAG | | CGHCLIINNVNFCRESGLRTRTGSNIDC | |
| | ATTTGGCTTACATCCTGAGCATGGAG | | EKLRRRFSSLHFMVEVKGDLTAKKMVL | |
| | CCCTGTGGCCACTGCCTCATTATCAA | | ALLELARQDHGALDCCVVVILSHGCQA | |
| | CAATGTGAACTTCTGCCGTGAGTCCG | | SHLQFPGAVYGTDGCPVSVEKIVNIFNG | |
| | GGCTCCGCACCCGCACTGGCTCCAA | | TSCPSLGGKPKLFFIQACGGEQKDHGF | |
| | CATCGACTGTGAGAAGTTGCGGCGTC | | EVASTSPEDESPGSNPEPDATPFQEGL | |
| | GCTTCTCCTCGCTGCATTTCATGGTG | | RTFDQLDAISSLPTPSDIFVSYSTFPGFV | |
| | GAGGTGAAGGGCGACCTGACTGCCA | | SWRDPKSGSWYVETLDDIFEQWAHSE | |
| | AGAAAATGGTGCTGGCTTTGCTGGAG | | DLQSLLLRVANAVSVKGIYKQMPGCFN | |
| | CTGGCGCgGCAGGACCACGGTGCTC | | FLRKKLFFKTSASRA | |
| | TGGACTGCTGCGTGGTGGTCATTCTC | | | |
| | TCTCACGGCTGTCAGGCCAGCCACCT | | | |
| | GCAGTTCCCAGGGGCTGTCTACGGC | | | |
| | ACAGATGGATGCCCTGTGTCGGTCGA | | | |
| | GAAGATTGTGAACATCTTCAATGGGA | | | |
| | CCAGCTGCCCCAGCCTGGGAGGGAA | | | |
| | GCCCAAGCTCTTTTTCATCCAGGCCT | | | |
| | GTGGTGGGGAGCAGAAAGACCATGG | | | |
| | GTTTGAGGTGGCCTCCACTTCCCCTG | | | |
| | AAGACGAGTCCCCTGGCAGTAACCCC | | | |
| | GAGCCAGATGCCACCCCGTTCCAGG | | | |
| | AAGGTTTGAGGACCTTCGACCAGCTG | | | |
| | GACGCCATATCTAGTTTGCCCACACC | | | |
| | CAGTGACATCTTTGTGTCCTACTCTAC | | | |
| | TTTCCCAGGTTTTGTTTCCTGGAGGG | | | |
| | ACCCCAAGAGTGGCTCCTGGTACGTT | | | |
| | GAGACCCTGGACGACATCTTTGAGCA | | | |
| | GTGGGCTCACTCTGAAGACCTGCAGT | | | |
| | CCCTCCTGCTTAGGGTCGCTAATGCT | | | |
| | GTTTCGGTGAAAGGGATTTATAAACA | | | |
| | GATGCCTGGTTGCTTTAATTTCCTCCG | | | |
| | GAAAAAACTTTTCTTTAAAACATCAGC | | | |
| | TAGCAGAGCC | | | |
| Linker | ccgcGG | 1774 | PR | 1775 |
| T2A | GAAGGCCGAGGGAGCCTGCTGACAT | 1776 | EGRGSLLTCGDVEENPGP | 1777 |
| | GTGGCGATGTGGAGGAAAACCCAGG | | | |
| | ACCA | | | |
| ΔCD19 | ATGCCACCACCTCGCCTGCTGTTCTT | 1778 | MPPPRLLFFLLFLTPMEVRPEEPLVVKV | 1779 |
| | TCTGCTGTTCCTGACACCTATGGAGG | | EEGDNAVLQCLKGTSDGPTQQLTWSR | |
| | TGCGACCTGAGGAACCACTGGTCGTG | | ESPLKPFLKLSLGLPGLGIHMRPLAIWL | |
| | AAGGTCGAGGAAGGCGACAATGCCG | | FIFNVSQQMGGFYLCQPGPPSEKAWQ | |
| | TGCTGCAGTGCCTGAAAGGCACTTCT | | PGWTVNVEGSGELFRWNVSDLGGLGC | |
| | GATGGGCCAACTCAGCAGCTGACCTG | | GLKNRSSEGPSSPSGKLMSPKLYVWA | |
| | GTCCAGGGAGTCTCCCCTGAAGCCTT | | KDRPEIWEGEPPCLPPRDSLNQSLSQD | |
| | TTCTGAAACTGAGCCTGGGACTGCCA | | LTMAPGSTLWLSCGVPPDSVSRGPLS | |
| | GGACTGGGAATCCACATGCGCCCTCT | | WTHVHPKGPKSLLSLELKDDRPARDM | |
| | GGCTATCTGGCTGTTCATCTTCAACG | | WVMETGLLLPRATAQDAGKYYCHRGN | |
| | TGAGCCAGCAGATGGGAGGATTCTAC | | LTMSFHLEITARPVLWHWLLRTGGWKV | |
| | CTGTGCCAGCCAGGACCACCATCCGA | | SAVTLAYLIFCLCSLVGILHLQRALVLRR | |
| | GAAGGCCTGGCAGCCTGGATGGACC | | KRKRMTDPTRRF | |
| | GTCAACGTGGAGGGGTCTGGAGAAC | | | |
| | TGTTTAGGTGGAATGTGAGTGACCTG | | | |
| | GGAGGACTGGGATGTGGGCTGAAGA | | | |
| | ACCGCTCCTCTGAAGGCCCAAGTTCA | | | |
| | CCCTCAGGGAAGCTGATGAGCCCAAA | | | |
| | ACTGTACGTGTGGGCCAAAGATCGGC | | | |
| | CCGAGATCTGGGAGGGAGAACCTCC | | | |
| | ATGCCTGCCACCTAGAGACAGCCTGA | | | |
| | ATCAGAGTCTGTCACAGGATCTGACA | | | |
| | ATGGCCCCCGGGTCCACTCTGTGGCT | | | |
| | GTCTTGTGGAGTCCCACCCGACAGCG | | | |
| | TGTCCAGAGGCCCTCTGTCCTGGACC | | | |
| | CACGTGCATCCTAAGGGGCCAAAAAG | | | |
| | TCTGCTGTCACTGGAACTGAAGGACG | | | |
| | ATCGGCCTGCCAGAGACATGTGGGTC | | | |
| | ATGGAGACTGGACTGCTGCTGCCACG | | | |
| | AGCAACCGCACAGGATGCTGGAAAAT | | | |
| | ACTATTGCCACCGGGGCAATCTGACA | | | |
| | ATGTCCTTCCATCTGGAGATCACTGC | | | |
| | AAGGCCCGTGCTGTGGCACTGGCTG | | | |
| | CTGCGAACCGGAGGATGGAAGGTCA | | | |
| | GTGCTGTGACACTGGCATATCTGATC | | | |
| | TTTTGCCTGTGCTCCCTGGTGGGCAT | | | |
| | TCTGCATCTGCAGAGAGCCCTGGTGC | | | |
| | TGCGGAGAAAGAGAAAGAGAATGACT | | | |
| | GACCCAACAAGAAGGTTT | | | |
| STOP | TGA | 1780 | stop | |

APPENDIX 22
pBP1351--pSFG-SP163.FKBP.FRB.ΔC9.T2A-αhPSCA.Q.CD8stm.ζ.2A-IMC

| | | SEO ID | | SEQ ID |
|---|---|---|---|---|
| Fragment | Nucleotide | NO: | Peptide | NO: |
| QBI SP163 | AGCGCAGAGGCTTGGGGCAGCCGAG | 1781 | AQRLGAAERQPGPGPGLGSRRERSPP | 1782 |
| | CGGCAGCCAGGCCCCGGCCCGGGC | | RRARERAASQSEPEREREPRRPRTAS | |
| | CTCGGTTCCAGAAGGGAGAGGAGCC | | ET | |
| | CGCCAAGGCGCGCAAGAGAGCGGGC | | | |
| | TGCCTCGCAGTCCGAGCCGGAGAGG | | | |
| | GAGCGCGAGCCGCGCCGGCCCCGG | | | |
| | ACGGCCTCCGAAACC | | | |
| FKBP″ | GGcGTGCAaGTGGAaACTATaAGCCCg | 1783 | GVQVETISPGDGRTFPKRGQTCVVHYT | 1784 |
| | GGAGAcGGCcGcACATTtCCCAAgAGA | | GMLEDGKKFDSSRDRNKPFKFMLGKQ | |
| | GGcCAGACcTGCGTgGTGCAcTATACa | | EVIRGWEEGVAQMSVGQRAKLTISPDY | |
| | GGAATGCTGGAgGACGGgAAGAAaTT | | AYGATGHPGIIPPHATLVFDVELLKLE | |
| | CGAtAGCtcCCGGGAtCGAAAtAAGCCtT | | | |
| | TCAAaTTCATGCTGGGcAAGCAaGAAG | | | |
| | TcATCaGaGGCTGGGAaGAAGGcGTC | | | |
| | GCcCAGATGTCcGTGGGtCAGcGcGCC | | | |
| | AAgCTGACaATTAGtCCAGAtTACGCcT | | | |
| | ATGGcGCAACaGGCCAtCCCGGcATCA | | | |
| | TcCCCCCaCATGCcACACTcGTCTTtGA | | | |
| | TGTcGAGCTcCTGAAaCTGGAg | | | |
| Linker | GGCGGGcaattg | 1785 | ggql | 1786 |
| FRB | gaaatgTGGCATGAAGGGTTGGAAGAA | 1787 | EMWHEGLEEASRLYFGERNVKGMFEV | 1788 |
| | GCTTCAAGGCTGTACTTCGGAGAGAG | | LEPLHAMMERGPQTLKETSFNQAYGR | |
| | GAACGTGAAGGGCATGTTTGAGGTTC | | DLMEAQEWCRKYMKSGNVKDLTQAW | |
| | TTGAACCTCTGCACGCCATGATGGAA | | DLYYHVFRRISK | |
| | CGGGGACCGCAGACACTGAAAGAAA | | | |
| | CCTCTTTTAATCAGGCCTACGGCAGA | | | |
| | GACCTGATGGAGGCCCAAGAATGGT | | | |
| | GTAGAAAGTATATGAAATCCGGTAAC | | | |
| | GTGAAAGACCTGactCAGGCCTGGGA | | | |
| | CCTTTATTACCATGTGTTCAGGCGGAT | | | |
| | CAGTAAG | | | |
| Linker | TCAGGCGGTGGCTCAGGTccatgg | 1789 | SGGGSGPW | 1790 |
| Δcaspase9 | GGATTTGGTGATGTCGGTGCTCTTGA | 1791 | GFGDVGALESLRGNADLAYILSMEPCG | 1792 |
| | GAGTTTGAGGGGAAATGCAGATTTGG | | HCLIINNVNFCRESGLRTRTGSNIDCEK | |
| | CTTACATCCTGAGCATGGAGCCCTGT | | LRRRFSSLHFMVEVKGDLTAKKMVLAL | |
| | GGCCACTGCCTCATTATCAACAATGT | | LELARQDHGALDCCVVVILSHGCQASH | |
| | GAACTTCTGCCGTGAGTCCGGGCTCC | | LQFPGAVYGTDGCPVSVEKIVNIFNGTS | |
| | GCACCCGCACTGGCTCCAACATCGAC | | CPSLGGKPKLFFIQACGGEQKDHGFEV | |
| | TGTGAGAAGTTGCGGCGTCGCTTCTC | | ASTSPEDESPGSNPEPDATPFQEGLRT | |
| | CTCGCTGCATTTCATGGTGGAGGTGA | | FDQLDAISSLPTPSDIFVSYSTFPGFVS | |
| | AGGGCGACCTGACTGCCAAGAAAATG | | WRDPKSGSWYVETLDDIFEQWAHSED | |
| | GTGCTGGCTTTGCTGGAGCTGGCGCg | | LQSLLLRVANAVSVKGIYKQMPGCFNF | |
| | GCAGGACCACGGTGCTCTGGACTGC | | LRKKLFFKTSASRA | |
| | TGCGTGGTGGTCATTCTCTCTCACGG | | | |
| | CTGTCAGGCCAGCCACCTGCAGTTCC | | | |
| | CAGGGGCTGTCTACGGCACAGATGG | | | |
| | ATGCCCTGTGTCGGTCGAGAAGATTG | | | |
| | TGAACATCTTCAATGGGACCAGCTGC | | | |
| | CCCAGCCTGGGAGGGAAGCCCAAGC | | | |
| | TCTTTTTCATCCAGGCCTGTGGTGGG | | | |
| | GAGCAGAAAGAtCATGGGTTTGAGGT | | | |
| | GGCCTCCACTTCCCCTGAAGACGAGT | | | |
| | CCCCTGGCAGTAACCCCGAGCCAGAT | | | |
| | GCCACCCCGTTCCAGGAAGGTTTGAG | | | |
| | GACCTTCGACCAGCTGGACGCCATAT | | | |
| | CTAGTTTGCCCACACCCAGTGACATC | | | |
| | TTTGTGTCCTACTCTACTTTCCCAGGT | | | |
| | TTTGTTTCCTGGAGGGACCCCAAGAG | | | |
| | TGGCTCCTGGTACGTTGAGACCCTGG | | | |
| | ACGACATCTTTGAGCAGTGGGCTCAC | | | |
| | TCTGAAGACCTGCAGTCCCTCCTGCT | | | |
| | TAGGGTCGCTAATGCTGTTTCGGTGA | | | |
| | AAGGGATTTATAAACAGATGCCTGGT | | | |
| | TGCTTTAATTTCCTCCGGAAAAAACTT | | | |
| | TTCTTTAAAACATCAGCTAGCAGAGCC | | | |
| Linker | ggatctggaccgcGG | 1793 | GSGPR | 1794 |
| T2A | GAAGGCCGAGGGAGCCTGCTGACAT | 1795 | EGRGSLLTCGDVEENPGP | 1796 |
| | GTGGCGATGTGGAGGAAAACCCAGG | | | |
| | ACCA | | | |
| Linker | CCATGG | 1797 | PW | 1798 |
| Signal Peptide | ATGGAGTTTGGACTTTCTTGGTTGTTT | 1799 | MEFGLSWLFLVAILKGVQCSR | 1800 |
| | TTGGTGGCAATTCTGAAGGGTGTCCA | | | |
| | GTGTAGCAGG | | | |
| PSCA(A11) VL | GACATCCAACTGACGCAAAGCCCATC | 1801 | DIQLTQSPSTLSASMGDRVTITCSASSS | 1802 |
| | TACACTCAGCGCTAGCATGGGGGACA | | VRFIHWYQQKPGKAPKRLIYDTSKLAS | |
| | GGGTCACAATCACGTGCTCTGCCTCA | | GVPSRFSGSGSGTDFTLTISSLQPEDFA | |
| | AGTTCCGTTAGGTTTATCCATTGGTAT | | TYYCQQWGSSPFTFGQGTKVEIK | |
| | CAGCAGAAACCTGGAAAGGCCCCAAA | | | |
| | AAGACTGATCTATGATACCAGCAAGC | | | |
| | TGGCTTCCGGAGTGCCCTCAAGGTTC | | | |
| | TCAGGATCTGGCAGTGGGACCGATTT | | | |
| | CACCCTGACAATTAGCAGCCTTCAGC | | | |
| | CAGAGGATTTCGCAACCTATTACTGT | | | |
| | CAGCAATGGGGGTCCAGCCCATTCAC | | | |
| | TTTCGGCCAAGGAACAAAGGTGGAGA | | | |
| | TAAAA | | | |
| Flex | GGCGGAGGAAGCGGAGGTGGGGGC | 1803 | gggsgggg | 1804 |
| PSCA(A11) VH | GAGGTGCAGCTCGTGGAGTATGGCG | 1805 | EVQLVEYGGGLVQPGGSLRLSCAASG | 1806 |
| | GGGGCCTGGTGCAGCCTGGGGGTAG | | FNIKDYYIHWVRQAPGKGLEWVAWIDP | |
| | TCTGAGGCTCTCCTGCGCTGCCTCTG | | ENGDTEFVPKFQGRATMSADTSKNTAY | |
| | GCTTTAACATTAAAGACTACTACATAC | | LQMNSLRAEDTAVYYCKTGGFWGQGT | |
| | ATTGGGTGCGGCAGGCCCCAGGCAA | | LVTVSS | |
| | AGGGCTCGAATGGGTGGCCTGGATT | | | |
| | GACCCTGAGAATGGTGACACTGAGTT | | | |
| | TGTCCCCAAGTTTCAGGGCAGAGCCA | | | |
| | CCATGAGCGCTGACACAAGCAAAAAC | | | |
| | ACTGCTTATCTCCAAATGAATAGCCTG | | | |
| | CGAGCTGAAGATACAGCAGTCTATTA | | | |
| | CTGCAAGACGGGAGGATTCTGGGGC | | | |
| | CAGGGAACTCTGGTGACAGTTAGTTCC | | | |
| Linker | GGATCC | 1807 | gs | 1808 |
| CD34 epitope | GAACTTCCTACTCAGGGGACTTTCTC | 1809 | ELPTQGTFSNVSTNVS | 1810 |
| | AAACGTTAGCACAAACGTAAGT | | | |
| CD8 stalk | CCCGCCCCAAGACCCCCCACACCTG | 1811 | PAPRPPTPAPTIASQPLSLRPEACRPAA | 1812 |
| | CGCCGACCATTGCTTCTCAACCCCTG | | GGAVHTRGLDFACD | |
| | AGTTTGAGACCCGAGGCCTGCCGGC | | | |
| | CAGCTGCCGGCGGGGCCGTGCATAC | | | |
| | AAGAGGACTCGATTTCGCTTGCGAC | | | |
| CD8 transmembrane | ATCTATATCTGGGCACCTCTCGCTGG | 1813 | IYIWAPLAGTCGVLLLSLVITLYCNHRNR | 1814 |
| | CACCTGTGGAGTCCTTCTGCTCAGCC | | RRVCKCPR | |
| | TGGTTATTACTCTGTACTGTAATCACC | | | |
| | GGAATCGCCGCCGCGTTTGTAAGTGT | | | |
| | CCCAGG | | | |
| Linker | GTCGAC | 1815 | VD | 1816 |
| CD3ζ | AGAGTGAAGTTCAGCAGGAGCGCAG | 1817 | RVKFSRSADAPAYQQGQNQLYNELNL | 1818 |
| | ACGCCCCCGCGTACCAGCAGGGCCA | | GRREEYDVLDKRRGRDPEMGGKPRRK | |
| | GAACCAGCTCTATAACGAGCTCAATC | | NPQEGLYNELQKDKMAEAYSEIGMKGE | |
| | TAGGACGAAGAGAGGAGTACGATGTT | | RRRGKGHDGLYQGLSTATKDTYDALH | |
| | TTGGACAAGAGACGTGGCCGGGACC | | MQALPPR | |
| | CTGAGATGGGGGGAAAGCCGAGAAG | | | |
| | GAAGAACCCTCAGGAAGGCCTGTACA | | | |
| | ATGAACTGCAGAAAGATAAGATGGCG | | | |
| | GAGGCCTACAGTGAGATTGGGATGAA | | | |
| | AGGCGAGCGCCGGAGGGGCAAGGG | | | |
| | GCACGATGGCCTTTACCAGGGTCTCA | | | |
| | GTACAGCCACCAAGGACACCTACGAC | | | |
| | GCCCTTCACATGCAAGCTCTTCCACC | | | |
| | TCGT | | | |
| Linker | gGAACGCGTGGATCGGGA | 1819 | gtrgsg | 1820 |
| P2A | GCTACTAACTTCAGCCTGCTGAAGCA | 1821 | ATNFSLLKQAGDVEENPGP | 1822 |
| | GGCTGGAGACGTGGAGGAGAACcccg | | | |
| | ggcct | | | |
| MyD88 | atggctgcaggaggtcccggcgcggggtctgcggcc | 1823 | MAAGGPGAGSAAPVSSTSSLPLAALN | 1824 |
| | ccggtctectccacatcctcccttcccctggctgctctca | | MRVRRRLSLFLNVRTQVAADWTALAEE | |
| | acatgcgagtgcggcgccgcctgtctctgttcttgaacg | | MDFEYLEIRQLETQADPTGRLLDAWQG | |
| | tgcggacacaggtggcggccgactggaccgcgctgg | | RPGASVGRLLDLLTKLGRDDVLLELGP | |
| | cggaggagatggactttgagtacttggagatccggca | | SIEEDCQKYILKQQQEEAEKPLQVAAVD | |
| | actggagacacaagcggaccccactggcaggctgct | | SSVPRTAELAGITTLDDPLGHMPERFDA | |
| | ggacgcctggcagggacgccctggcgcctctgtagg | | FICYCPSDI | |
| | ccgactgctcgatctgcttaccaagctgggccgcgacg | | | |
| | acgtgctgctggagctgggacccagcattgaggagg | | | |
| | attgccaaaagtatatcttgaagcagcagcaggagga | | | |
| | ggctgagaagcctttacaggtggccgctgtagacagc | | | |
| | agtgtcccacggacagcagagctggcgggcatcacc | | | |
| | acacttgatgaccccctggggcatatgcctgagcgtttc | | | |
| | gatgccttcatctgctattgccccagcgacatc | | | |
| Linker | gtcgag | 1825 | VE | 1826 |
| CD40 | aaaaaggtggccaagaagccaaccaataaggcccc | 1827 | KKVAKKPTNKAPHPKQEPQEINFPDDL | 1828 |
| | ccaccccaagcaggagccccaggagatcaattttccc | | PGSNTAAPVQETLHGCQPVTQEDGKE | |
| | gacgatcttcctggctccaacactgctgctccagtgcag | | SRISVQERQ | |
| | gagactttacatggatgccaaccggtcacccaggagg | | | |
| | atggcaaagagagtcgcatctcagtgcaggagagac | | | |
| | ag | | | |
| Linker | gtcgag | 1829 | VE | 1830 |
| FKBPᵥ′ | GGcGTcCAaGTcGAaACcATtagtCCcGG | 1831 | GVQVETISPGDGRTFPKRGQTCVVHYT | 1832 |
| | cGAtGGcaGaACaTTtCCtAAaaGgGGaC | | GMLEDGKKVDSSRDRNKPFKFMLGKQ | |
| | AaACaTGtGTcGTcCAtTAtACaGGcATGt | | EVIRGWEEGVAQMSVGQRAKLTISPDY | |
| | TgGAgGAcGGcAAaAAgGTgGAcagtagta | | AYGATGHPGIIPPHATLVFDVELLKLE | |
| | GaGAtcGcAAtAAaCCtTTcAAaTTcATGtT | | | |
| | gGGaAAaCAaGAaGTcATtaGgGGaTGG | | | |
| | GAgGAgGGcGTgGCtCAaATGtccGTcG | | | |
| | GcCAacGcGCtAAgCTcACcATcagcCCc | | | |
| | GAcTAcGCaTAcGGcGCtACcGGaCAtC | | | |
| | CcGGaATtATtCCcCCtCAcGCtACctTgG | | | |
| | TgTTtGAcGTcGAaCTgtTgAAgCTcGAa | | | |
| Linker | gtcgag | 1833 | VE | 1834 |
| FKBPᵥ | ggagtgcaggtggagactatctccccaggagacggg | 1835 | GVQVETISPGDGRTFPKRGQTCVVHYT | 1836 |
| | cgcaccttccccaagcgcggccagacctgcgtggtgc | | GMLEDGKKVDSSRDRNKPFKFMLGKQ | |
| | actacaccgggatgcttgaagatggaaagaaagttga | | EVIRGWEEGVAQMSVGQRAKLTISPDY | |
| | ttcctcccgggacagaaacaagccctttaagtttatgct | | AYGATGHPGIIPPHATLVFDVELLKLE | |
| | aggcaagcaggaggtgatccgaggctgggaagaag | | | |
| | gggttgcccagatgagtgtgggtcagagagccaaact | | | |
| | gactatatctccagattatgcctatggtgccactgggca | | | |
| | cccaggcatcatcccaccacatgccactctcgtcttcg | | | |
| | atgtggagcttctaaaactggaa | | | |
| STOP | TGA | 1837 | stop | |

APPENDIX 23
pBP1373--pSFG-sp-FKBP.FRB.ΔC9.T2A-αhPSCAscFv.Q.CD8stm.ζ

| | | SEQ | | SEQ |
|---|---|---|---|---|
| | | ID | | ID |
| Fragment | Nucleotide | NO: | Peptide | NO: |
| QBI SP163 | AGCGCAGAGGCTTGGGGCAGCCGAG | 1838 | AQRLGAAERQPGPGPGLGSRRERSPP | 1839 |
| | CGGCAGCCAGGCCCCGGCCCGGGC | | RRARERAASQSEPEREREPRRPRTAS | |
| | CTCGGTTCCAGAAGGGAGAGGAGCC | | ET | |
| | CGCCAAGGCGCGCAAGAGAGCGGGC | | | |
| | TGCCTCGCAGTCCGAGCCGGAGAGG | | | |
| | GAGCGCGAGCCGCGCCGGCCCCGG | | | |
| | ACGGCCTCCGAAACC | | | |
| FKBP″ | GGcGTGCAaGTGGAaACTATaAGCCCg | 1840 | GVQVETISPGDGRTFPKRGQTCVVHYT | 1841 |
| | GGAGAcGGCcGcACATTtCCCAAgAGA | | GMLEDGKKFDSSRDRNKPFKFMLGKQ | |
| | GGcCAGACcTGCGTgGTGCAcTATACa | | EVIRGWEEGVAQMSVGQRAKLTISPDY | |
| | GGAATGCTGGAgGACGGgAAGAAaTT | | AYGATGHPGIIPPHATLVFDVELLKLE | |
| | CGAtAGCtcCCGGGAtCGAAAtAAGCCtT | | | |
| | TCAAaTTCATGCTGGGcAAGCAaGAAG | | | |
| | TcATCaGaGGCTGGGAaGAAGGcGTC | | | |
| | GCcCAGATGTCcGTGGGtCAGcGcGCC | | | |
| | AAgCTGACaATTAGtCCAGAtTACGCcT | | | |
| | ATGGcGCAACaGGCCAtCCCGGcATCA | | | |
| | TcCCCCCaCATGCcACACTcGTCTTtGA | | | |
| | TGTcGAGCTcCTGAAaCTGGAg | | | |
| Linker | GGCGGGcaattg | 1842 | ggql | 1843 |
| FRB | gaaatgTGGCATGAAGGGTTGGAAGAA | 1844 | EMWHEGLEEASRLYFGERNVKGMFEV | 1845 |
| | GCTTCAAGGCTGTACTTCGGAGAGAG | | LEPLHAMMERGPQTLKETSFNQAYGR | |
| | GAACGTGAAGGGCATGTTTGAGGTTC | | DLMEAQEWCRKYMKSGNVKDLTQAW | |
| | TTGAACCTCTGCACGCCATGATGGAA | | DLYYHVFRRISK | |
| | CGGGGACCGCAGACACTGAAAGAAA | | | |
| | CCTCTTTTAATCAGGCCTACGGCAGA | | | |
| | GACCTGATGGAGGCCCAAGAATGGT | | | |
| | GTAGAAAGTATATGAAATCCGGTAAC | | | |
| | GTGAAAGACCTGactCAGGCCTGGGA | | | |
| | CCTTTATTACCATGTGTTCAGGCGGAT | | | |
| | CAGTAAG | | | |
| Linker | TCAGGCGGTGGCTCAGGTccatgg | 1846 | SGGGSGPW | 1847 |
| Δcaspase9 | GGATTTGGTGATGTCGGTGCTCTTGA | 1848 | GFGDVGALESLRGNADLAYILSMEPCG | 1849 |
| | GAGTTTGAGGGGAAATGCAGATTTGG | | HCLIINNVNFCRESGLRTRTGSNIDCEK | |
| | CTTACATCCTGAGCATGGAGCCCTGT | | LRRRFSSLHFMVEVKGDLTAKKMVLAL | |
| | GGCCACTGCCTCATTATCAACAATGT | | LELARQDHGALDCCVVVILSHGCQASH | |
| | GAACTTCTGCCGTGAGTCCGGGCTCC | | LQFPGAVYGTDGCPVSVEKIVNIFNGTS | |
| | GCACCCGCACTGGCTCCAACATCGAC | | CPSLGGKPKLFFIQACGGEQKDHGFEV | |
| | TGTGAGAAGTTGCGGCGTCGCTTCTC | | ASTSPEDESPGSNPEPDATPFQEGLRT | |
| | CTCGCTGCATTTCATGGTGGAGGTGA | | FDQLDAISSLPTPSDIFVSYSTFPGFVS | |
| | AGGGCGACCTGACTGCCAAGAAAATG | | WRDPKSGSWYVETLDDIFEQWAHSED | |
| | GTGCTGGCTTTGCTGGAGCTGGCGCg | | LQSLLLRVANAVSVKGIYKQMPGCFNF | |
| | GCAGGACCACGGTGCTCTGGACTGC | | LRKKLFFKTSASRA | |
| | TGCGTGGTGGTCATTCTCTCTCACGG | | | |
| | CTGTCAGGCCAGCCACCTGCAGTTCC | | | |
| | CAGGGGCTGTCTACGGCACAGATGG | | | |
| | ATGCCCTGTGTCGGTCGAGAAGATTG | | | |
| | TGAACATCTTCAATGGGACCAGCTGC | | | |
| | CCCAGCCTGGGAGGGAAGCCCAAGC | | | |
| | TCTTTTTCATCCAGGCCTGTGGTGGG | | | |
| | GAGCAGAAAGAtCATGGGTTTGAGGT | | | |
| | GGCCTCCACTTCCCCTGAAGACGAGT | | | |
| | CCCCTGGCAGTAACCCCGAGCCAGAT | | | |
| | GCCACCCCGTTCCAGGAAGGTTTGAG | | | |
| | GACCTTCGACCAGCTGGACGCCATAT | | | |
| | CTAGTTTGCCCACACCCAGTGACATC | | | |
| | TTTGTGTCCTACTCTACTTTCCCAGGT | | | |
| | TTTGTTTCCTGGAGGGACCCCAAGAG | | | |
| | TGGCTCCTGGTACGTTGAGACCCTGG | | | |
| | ACGACATCTTTGAGCAGTGGGCTCAC | | | |
| | TCTGAAGACCTGCAGTCCCTCCTGCT | | | |
| | TAGGGTCGCTAATGCTGTTTCGGTGA | | | |
| | AAGGGATTTATAAACAGATGCCTGGT | | | |
| | TGCTTTAATTTCCTCCGGAAAAAACTT | | | |
| | TTCTTTAAAACATCAGCTAGCAGAGCC | | | |
| Linker | ggatctggaccgcGG | 1850 | GSGPR | 1851 |
| T2A | GAAGGCCGAGGGAGCCTGCTGACAT | 1852 | EGRGSLLTCGDVEENPGP | 1853 |
| | GTGGCGATGTGGAGGAAAACCCAGG | | | |
| | ACCA | | | |
| Linker | CCATGG | 1854 | PW | 1855 |
| Signal | ATGGAGTTTGGACTTTCTTGGTTGTTT | 1856 | MEFGLSWLFLVAILKGVQCSR | 1857 |
| Peptide | TTGGTGGCAATTCTGAAGGGTGTCCA | | | |
| | GTGTAGCAGG | | | |
| PSCA(A11) | GACATCCAACTGACGCAAAGCCCATC | 1858 | DIQLTQSPSTLSASMGDRVTITCSASSS | 1859 |
| VL | TACACTCAGCGCTAGCATGGGGGACA | | VRFIHWYQQKPGKAPKRLIYDTSKLAS | |
| | GGGTCACAATCACGTGCTCTGCCTCA | | GVPSRFSGSGSGTDFTLTISSLQPEDFA | |
| | AGTTCCGTTAGGTTTATCCATTGGTAT | | TYYCQQWGSSPFTFGQGTKVEIK | |
| | CAGCAGAAACCTGGAAAGGCCCCAAA | | | |
| | AAGACTGATCTATGATACCAGCAAGC | | | |
| | TGGCTTCCGGAGTGCCCTCAAGGTTC | | | |
| | TCAGGATCTGGCAGTGGGACCGATTT | | | |
| | CACCCTGACAATTAGCAGCCTTCAGC | | | |
| | CAGAGGATTTCGCAACCTATTACTGT | | | |
| | CAGCAATGGGGGTCCAGCCCATTCAC | | | |
| | TTTCGGCCAAGGAACAAAGGTGGAGA | | | |
| | TAAAA | | | |
| Flex | GGCGGAGGAAGCGGAGGTGGGGGC | 1860 | gggsgggg | 1861 |
| PSCA(A11) | GAGGTGCAGCTCGTGGAGTATGGCG | 1862 | EVQLVEYGGGLVQPGGSLRLSCAASG | 1863 |
| VH | GGGGCCTGGTGCAGCCTGGGGGTAG | | FNIKDYYIHWVRQAPGKGLEWVAWIDP | |
| | TCTGAGGCTCTCCTGCGCTGCCTCTG | | ENGDTEFVPKFQGRATMSADTSKNTAY | |
| | GCTTTAACATTAAAGACTACTACATAC | | LQMNSLRAEDTAVYYCKTGGFWGQGT | |
| | ATTGGGTGCGGCAGGCCCCAGGCAA | | LVTVSS | |
| | AGGGCTCGAATGGGTGGCCTGGATT | | | |
| | GACCCTGAGAATGGTGACACTGAGTT | | | |
| | TGTCCCCAAGTTTCAGGGCAGAGCCA | | | |
| | CCATGAGCGCTGACACAAGCAAAAAC | | | |
| | ACTGCTTATCTCCAAATGAATAGCCTG | | | |
| | CGAGCTGAAGATACAGCAGTCTATTA | | | |
| | CTGCAAGACGGGAGGATTCTGGGGC | | | |
| | CAGGGAACTCTGGTGACAGTTAGTTC | | | |
| | C | | | |
| Linker | GGATCC | 1864 | gs | 1865 |
| CD34 epitope | GAACTTCCTACTCAGGGGACTTTCTC | 1866 | ELPTQGTFSNVSTNVS | 1867 |
| | AAACGTTAGCACAAACGTAAGT | | | |
| CD8 stalk | CCCGCCCCAAGACCCCCCACACCTG | 1868 | PAPRPPTPAPTIASQPLSLRPEACRPAA | 1869 |
| | CGCCGACCATTGCTTCTCAACCCCTG | | GGAVHTRGLDFACD | |
| | AGTTTGAGACCCGAGGCCTGCCGGC | | | |
| | CAGCTGCCGGCGGGGCCGTGCATAC | | | |
| | AAGAGGACTCGATTTCGCTTGCGAC | | | |
| CD8 | ATCTATATCTGGGCACCTCTCGCTGG | 1870 | IYIWAPLAGTCGVLLLSLVITLYCNHRN | 1871 |
| transmembrane | CACCTGTGGAGTCCTTCTGCTCAGCC | | RRRVCKCPR | |
| | TGGTTATTACTCTGTACTGTAATCACC | | | |
| | GGAATCGCCGCCGCGTTTGTAAGTGT | | | |
| | CCCAGG | | | |
| Linker | GTCGAC | 1872 | VD | 1873 |
| CD3ζ | AGAGTGAAGTTCAGCAGGAGCGCAG | 1874 | RVKFSRSADAPAYQQGQNQLYNELNL | 1875 |
| | ACGCCCCCGCGTACCAGCAGGGCCA | | GRREEYDVLDKRRGRDPEMGGKPRRK | |
| | GAACCAGCTCTATAACGAGCTCAATC | | NPQEGLYNELQKDKMAEAYSEIGMKGE | |
| | TAGGACGAAGAGAGGAGTACGATGTT | | RRRGKGHDGLYQGLSTATKDTYDALH | |
| | TTGGACAAGAGACGTGGCCGGGACC | | MQALPPR | |
| | CTGAGATGGGGGGAAAGCCGAGAAG | | | |
| | GAAGAACCCTCAGGAAGGCCTGTACA | | | |
| | ATGAACTGCAGAAAGATAAGATGGCG | | | |
| | GAGGCCTACAGTGAGATTGGGATGAA | | | |
| | AGGCGAGCGCCGGAGGGGCAAGGG | | | |
| | GCACGATGGCCTTTACCAGGGTCTCA | | | |
| | GTACAGCCACCAAGGACACCTACGAC | | | |
| | GCCCTTCACATGCAAGCTCTTCCACC | | | |
| | TCG | | | |
| STOP | TGA | 1876 | stop | |

APPENDIX 24
pBP1385--pSFG-FRB.FKBP.ΔC9.T2A-ΔCD19

| | | SEQ ID | | SEQ ID |
|---|---|---|---|---|
| Fragment | Nucleotide | NO: | Peptide | NO: |
| FRB | gaaatgTGGCATGAAGGGTTGGAAGAA | 1877 | EMWHEGLEEASRLYFGERNVKGMFEV | 1878 |
| | GCTTCAAGGCTGTACTTCGGAGAGAG | | LEPLHAMMERGPQTLKETSFNQAYGR | |
| | GAACGTGAAGGGCATGTTTGAGGTTC | | DLMEAQEWCRKYMKSGNVKDLTQAW | |
| | TTGAACCTCTGCACGCCATGATGGAA | | DLYYHVFRRISK | |
| | CGGGGACCGCAGACACTGAAAGAAA | | | |
| | CCTCTTTTAATCAGGCCTACGGCAGA | | | |
| | GACCTGATGGAGGCCCAAGAATGGT | | | |
| | GTAGAAAGTATATGAAATCCGGTAAC | | | |
| | GTGAAAGACCTGactCAGGCCTGGGA | | | |
| | CCTTTATTACCATGTGTTCAGGCGGAT | | | |
| | CAGTAAG | | | |
| Linker | GGCGGGcaattg | 1879 | ggql | 1880 |
| FKBP″ | GGcGTGCAaGTGGAaACTATaAGCCCg | 1881 | GVQVETISPGDGRTFPKRGQTCVVHYT | 1882 |
| | GGAGAcGGCcGcACATTtCCCAAgAGA | | GMLEDGKKFDSSRDRNKPFKFMLGKQ | |
| | GGcCAGACcTGCGTgGTGCAcTATACa | | EVIRGWEEGVAQMSVGQRAKLTISPDY | |
| | GGAATGCTGGAgGACGGgAAGAAaTT | | AYGATGHPGIIPPHATLVFDVELLKLE | |
| | CGAtAGCtcCCGGGAtCGAAAtAAGCCtT | | | |
| | TCAAaTTCATGCTGGGcAAGCAaGAAG | | | |
| | TcATCaGaGGCTGGGAaGAAGGcGTC | | | |
| | GCcCAGATGTCcGTGGGtCAGcGcGCC | | | |
| | AAgCTGACaATTAGtCCAGAtTACGCcT | | | |
| | ATGGcGCAACaGGCCAtCCCGGcATCA | | | |
| | TcCCCCCaCATGCcACACTcGTCTTtGA | | | |
| | TGTcGAGCTcCTGAAaCTGGAg | | | |
| Linker | TCAGGCGGTGGCTCAGGTccatgg | 1883 | SGGGSGPW | 1884 |
| Δcaspase9 | GGATTTGGTGATGTCGGTGCTCTTGA | 1885 | GFGDVGALESLRGNADLAYILSMEPCG | 1886 |
| | GAGTTTGAGGGGAAATGCAGATTTGG | | HCLIINNVNFCRESGLRTRTGSNIDCEK | |
| | CTTACATCCTGAGCATGGAGCCCTGT | | LRRRFSSLHFMVEVKGDLTAKKMVLAL | |
| | GGCCACTGCCTCATTATCAACAATGT | | LELARQDHGALDCCVVVILSHGCQASH | |
| | GAACTTCTGCCGTGAGTCCGGGCTCC | | LQFPGAVYGTDGCPVSVEKIVNIFNGTS | |
| | GCACCCGCACTGGCTCCAACATCGAC | | CPSLGGKPKLFFIQACGGEQKDHGFEV | |
| | TGTGAGAAGTTGCGGCGTCGCTTCTC | | ASTSPEDESPGSNPEPDATPFQEGLRT | |
| | CTCGCTGCATTTCATGGTGGAGGTGA | | FDQLDAISSLPTPSDIFVSYSTFPGFVS | |
| | AGGGCGACCTGACTGCCAAGAAAATG | | WRDPKSGSWYVETLDDIFEQWAHSED | |
| | GTGCTGGCTTTGCTGGAGCTGGCGCg | | LQSLLLRVANAVSVKGIYKQMPGCFNF | |
| | GCAGGACCACGGTGCTCTGGACTGC | | LRKKLFFKTSASRA | |
| | TGCGTGGTGGTCATTCTCTCTCACGG | | | |
| | CTGTCAGGCCAGCCACCTGCAGTTCC | | | |
| | CAGGGGCTGTCTACGGCACAGATGG | | | |
| | ATGCCCTGTGTCGGTCGAGAAGATTG | | | |
| | TGAACATCTTCAATGGGACCAGCTGC | | | |
| | CCCAGCCTGGGAGGGAAGCCCAAGC | | | |
| | TCTTTTTCATCCAGGCCTGTGGTGGG | | | |
| | GAGCAGAAAGAtCATGGGTTTGAGGT | | | |
| | GGCCTCCACTTCCCCTGAAGACGAGT | | | |
| | CCCCTGGCAGTAACCCCGAGCCAGAT | | | |
| | GCCACCCCGTTCCAGGAAGGTTTGAG | | | |
| | GACCTTCGACCAGCTGGACGCCATAT | | | |
| | CTAGTTTGCCCACACCCAGTGACATC | | | |
| | TTTGTGTCCTACTCTACTTTCCCAGGT | | | |
| | TTTGTTTCCTGGAGGGACCCCAAGAG | | | |
| | TGGCTCCTGGTACGTTGAGACCCTGG | | | |
| | ACGACATCTTTGAGCAGTGGGCTCAC | | | |
| | TCTGAAGACCTGCAGTCCCTCCTGCT | | | |
| | TAGGGTCGCTAATGCTGTTTCGGTGA | | | |
| | AAGGGATTTATAAACAGATGCCTGGT | | | |
| | TGCTTTAATTTCCTCCGGAAAAAACTT | | | |
| | TTCTTTAAAACATCAGCTAGCAGAGCC | | | |
| Linker | ggatctggaccgcGG | 1887 | GSGPR | 1888 |
| T2A | GAAGGCCGAGGGAGCCTGCTGACAT | 1889 | EGRGSLLTCGDVEENPGP | 1890 |
| | GTGGCGATGTGGAGGAAAACCCAGG | | | |
| | ACCA | | | |
| ΔCD19 | ATGCCACCACCTCGCCTGCTGTTCTT | 1891 | MPPPRLLFFLLFLTPMEVRPEEPLVVKV | 1892 |
| | TCTGCTGTTCCTGACACCTATGGAGG | | EEGDNAVLQCLKGTSDGPTQQLTWSR | |
| | TGCGACCTGAGGAACCACTGGTCGTG | | ESPLKPFLKLSLGLPGLGIHMRPLAIWL | |
| | AAGGTCGAGGAAGGCGACAATGCCG | | FIFNVSQQMGGFYLCQPGPPSEKAWQ | |
| | TGCTGCAGTGCCTGAAAGGCACTTCT | | PGWTVNVEGSGELFRWNVSDLGGLGC | |
| | GATGGGCCAACTCAGCAGCTGACCTG | | GLKNRSSEGPSSPSGKLMSPKLYVWA | |
| | GTCCAGGGAGTCTCCCCTGAAGCCTT | | KDRPEIWEGEPPCLPPRDSLNQSLSQD | |
| | TTCTGAAACTGAGCCTGGGACTGCCA | | LTMAPGSTLWLSCGVPPDSVSRGPLS | |
| | GGACTGGGAATCCACATGCGCCCTCT | | WTHVHPKGPKSLLSLELKDDRPARDM | |
| | GGCTATCTGGCTGTTCATCTTCAACG | | WVMETGLLLPRATAQDAGKYYCHRGN | |
| | TGAGCCAGCAGATGGGAGGATTCTAC | | LTMSFHLEITARPVLWHWLLRTGGWKV | |
| | CTGTGCCAGCCAGGACCACCATCCGA | | SAVTLAYLIFCLCSLVGILHLQRALVLRR | |
| | GAAGGCCTGGCAGCCTGGATGGACC | | KRKRMTDPTRRF | |
| | GTCAACGTGGAGGGGTCTGGAGAAC | | | |
| | TGTTTAGGTGGAATGTGAGTGACCTG | | | |
| | GGAGGACTGGGATGTGGGCTGAAGA | | | |
| | ACCGCTCCTCTGAAGGCCCAAGTTCA | | | |
| | CCCTCAGGGAAGCTGATGAGCCCAAA | | | |
| | ACTGTACGTGTGGGCCAAAGATCGGC | | | |
| | CCGAGATCTGGGAGGGAGAACCTCC | | | |
| | ATGCCTGCCACCTAGAGACAGCCTGA | | | |
| | ATCAGAGTCTGTCACAGGATCTGACA | | | |
| | ATGGCCCCCGGGTCCACTCTGTGGCT | | | |
| | GTCTTGTGGAGTCCCACCCGACAGCG | | | |
| | TGTCCAGAGGCCCTCTGTCCTGGACC | | | |
| | CACGTGCATCCTAAGGGGCCAAAAAG | | | |
| | TCTGCTGTCACTGGAACTGAAGGACG | | | |
| | ATCGGCCTGCCAGAGACATGTGGGTC | | | |
| | ATGGAGACTGGACTGCTGCTGCCACG | | | |
| | AGCAACCGCACAGGATGCTGGAAAAT | | | |
| | ACTATTGCCACCGGGGCAATCTGACA | | | |
| | ATGTCCTTCCATCTGGAGATCACTGC | | | |
| | AAGGCCCGTGCTGTGGCACTGGCTG | | | |
| | CTGCGAACCGGAGGATGGAAGGTCA | | | |
| | GTGCTGTGACACTGGCATATCTGATC | | | |
| | TTTTGCCTGTGCTCCCTGGTGGGCAT | | | |
| | TCTGCATCTGCAGAGAGCCCTGGTGC | | | |
| | TGCGGAGAAAGAGAAAGAGAATGACT | | | |
| | GACCCAACAAGAAGGTTT | | | |
| STOP | TGA | 1893 | stop | |

APPENDIX 25
pBP1455--pSFG-MC.FKBP_{wt}.FRB_{L}.T2A-αPSCA.Q.CD8stm.ζ

| | | SEQ ID | | SEQ ID |
|---|---|---|---|---|
| Fragment | Nucleotide | NO: | Peptide | NO: |
| MyD88 | atggctgcaggaggtcccggcgcggggtctgcggcc | 1894 | MAAGGPGAGSAAPVSSTSSLPLAALN | 1895 |
| | ccggtctcctccacatcctcccttcccctggctgctctca | | MRVRRRLSLFLNVRTQVAADWTALAEE | |
| | acatgcgagtgcggcgccgcctgtctctgttcttgaacg | | MDFEYLEIRQLETQADPTGRLLDAWQG | |
| | tgcggacacaggtggcggccgactggaccgcgctgg | | RPGASVGRLLDLLTKLGRDDVLLELGP | |
| | cggaggagatggactttgagtacttggagatccggca | | SIEEDCQKYILKQQQEEAEKPLQVAAVD | |
| | actggagacacaagcggaccccactggcaggctgct | | SSVPRTAELAGITTLDDPLGHMPERFDA | |
| | ggacgcctggcagggacgccctggcgcctctgtagg | | FICYCPSDI | |
| | ccgactgctcgatctgcttaccaagctgggccgcgacg | | | |
| | acgtgctgctggagctgggacccagcattgaggagg | | | |
| | attgccaaaagtatatcttgaagcagcagcaggagga | | | |
| | ggctgagaagcctttacaggtggccgctgtagacagc | | | |
| | agtgtcccacggacagcagagctggcgggcatcacc | | | |
| | acacttgatgaccccctggggcatatgcctgagcgtttc | | | |
| | gatgccttcatctgctattgccccagcgacatc | | | |
| Linker | gtcgag | 1896 | VE | 1897 |
| CD40 | aaaaaggtggccaagaagccaaccaataaggcccc | 1898 | KKVAKKPTNKAPHPKQEPQEINFPDDL | 1899 |
| | ccaccccaagcaggagccccaggagatcaattttccc | | PGSNTAAPVQETLHGCQPVTQEDGKE | |
| | gacgatcttcctggctccaacactgctgctccagtgcag | | SRISVQERQ | |
| | gagactttacatggatgccaaccggtcacccaggagg | | | |
| | atggcaaagagagtcgcatctcagtgcaggagagac | | | |
| | ag | | | |
| Linker | gtcgag | 1900 | VE | 1901 |
| FKBP_{WT}′ | GGCGTCCAAGTCGAAACCATTAGTCC | 1902 | GVQVETISPGDGRTFPKRGQTCVVHYT | 1903 |
| | CGGCGATGGCAGAACATTTCCTACAA | | GMLEDGKKFDSSRDRNKPFKFMLGKQ | |
| | GGGGACAAACATGTGTCGTCCATTAT | | EVIRGWEEGVAQMSVGQRAKLTISPDY | |
| | ACAGGCATGTTGGAGGACGGCAAAAA | | AYGATGHPGIIPPHATLVFDVELLKLE | |
| | GTTCGACAGTAGTAGAGATCGCAATA | | | |
| | AACCTTTCAAATTCATGTTGGGAAAAC | | | |
| | AAGAAGTCATTAGGGGATGGGAGGA | | | |
| | GGGCGTGGCTCAAATGTCCGTCGGC | | | |
| | CAACGCGCTAAGCTCACCATCAGCCC | | | |
| | CGACTACGCATACGGCGCTACCGGA | | | |
| | CATCCCGGAATTATTCCCCCTCACGC | | | |
| | TACCTTGGTGTTTGACGTCGAACTGTT | | | |
| | GAAGCTCGAA | | | |
| Linker | gtcgag | 1904 | VE | 1905 |
| FRB_{L} | CAATTGGAAATGTGGCATGAAGGGTT | 1906 | QLEMWHEGLEEASRLYFGERNVKGMF | 1907 |
| | GGAAGAAGCTTCAAGGCTGTACTTCG | | EVLEPLHAMMERGPQTLKETSFNQAYG | |
| | GAGAGAGGAACGTGAAGGGCATGTTT | | RDLMEAQEWCRKYMKSGNVKDLLQA | |
| | GAGGTTCTTGAACCTCTGCACGCCAT | | WDLYYHVFRRISK | |
| | GATGGAACGGGGACCGCAGACACTG | | | |
| | AAAGAAACCTCTTTTAATCAGGCCTAC | | | |
| | GGCAGAGACCTGATGGAGGCCCAAG | | | |
| | AATGGTGTAGAAAGTATATGAAATCC | | | |
| | GGTAACGTGAAAGACCTGCTCCAGGC | | | |
| | CTGGGACCTTTATTACCATGTGTTCAG | | | |
| | GCGGATCAGTAAG | | | |
| Linker | GGCTCAGGT | 1908 | GSG | 1909 |
| T2A | GAAGGCCGAGGGAGCCTGCTGACAT | 1910 | EGRGSLLTCGDVEENPGP | 1911 |
| | GTGGCGATGTGGAGGAAAACCCAGG | | | |
| | ACCA | | | |
| Linker | CCATGG | 1912 | PW | 1913 |
| Signal Peptide | ATGGAGTTTGGACTTTCTTGGTTGTTT | 1914 | MEFGLSWLFLVAILKGVQCSR | 1915 |
| | TTGGTGGCAATTCTGAAGGGTGTCCA | | | |
| | GTGTAGCAGG | | | |
| PSCA(A11) VL | GACATCCAACTGACGCAAAGCCCATC | 1916 | DIQLTQSPSTLSASMGDRVTITCSASSS | 1917 |
| | TACACTCAGCGCTAGCATGGGGGACA | | VRFIHWYQQKPGKAPKRLIYDTSKLAS | |
| | GGGTCACAATCACGTGCTCTGCCTCA | | GVPSRFSGSGSGTDFTLTISSLQPEDFA | |
| | AGTTCCGTTAGGTTTATCCATTGGTAT | | TYYCQQWGSSPFTFGQGTKVEIK | |
| | CAGCAGAAACCTGGAAAGGCCCCAAA | | | |
| | AAGACTGATCTATGATACCAGCAAGC | | | |
| | TGGCTTCCGGAGTGCCCTCAAGGTTC | | | |
| | TCAGGATCTGGCAGTGGGACCGATTT | | | |
| | CACCCTGACAATTAGCAGCCTTCAGC | | | |
| | CAGAGGATTTCGCAACCTATTACTGT | | | |
| | CAGCAATGGGGGTCCAGCCCATTCAC | | | |
| | TTTCGGCCAAGGAACAAAGGTGGAGA | | | |
| | TAAAA | | | |
| Flex | GGCGGAGGAAGCGGAGGTGGGGGC | 1918 | gggsgggg | 1919 |
| PSCA(A11) VH | GAGGTGCAGCTCGTGGAGTATGGCG | 1920 | EVQLVEYGGGLVQPGGSLRLSCAASG | 1921 |
| | GGGGCCTGGTGCAGCCTGGGGGTAG | | FNIKDYYIHWVRQAPGKGLEWVAWIDP | |
| | TCTGAGGCTCTCCTGCGCTGCCTCTG | | ENGDTEFVPKFQGRATMSADTSKNTAY | |
| | GCTTTAACATTAAAGACTACTACATAC | | LQMNSLRAEDTAVYYCKTGGFWGQGT | |
| | ATTGGGTGCGGCAGGCCCCAGGCAA | | LVTVSS | |
| | AGGGCTCGAATGGGTGGCCTGGATT | | | |
| | GACCCTGAGAATGGTGACACTGAGTT | | | |
| | TGTCCCCAAGTTTCAGGGCAGAGCCA | | | |
| | CCATGAGCGCTGACACAAGCAAAAAC | | | |
| | ACTGCTTATCTCCAAATGAATAGCCTG | | | |
| | CGAGCTGAAGATACAGCAGTCTATTA | | | |
| | CTGCAAGACGGGAGGATTCTGGGGC | | | |
| | CAGGGAACTCTGGTGACAGTTAGTTCC | | | |
| Linker | GGATCC | 1922 | gs | 1923 |
| CD34 epitope | GAACTTCCTACTCAGGGGACTTTCTC | 1924 | ELPTQGTFSNVSTNVS | 1925 |
| | AAACGTTAGCACAAACGTAAGT | | | |
| CD8 stalk | CCCGCCCCAAGACCCCCCACACCTG | 1926 | PAPRPPTPAPTIASQPLSLRPEACRPAA | 1927 |
| | CGCCGACCATTGCTTCTCAACCCCTG | | GGAVHTRGLDFACD | |
| | AGTTTGAGACCCGAGGCCTGCCGGC | | | |
| | CAGCTGCCGGCGGGGCCGTGCATAC | | | |
| | AAGAGGACTCGATTTCGCTTGCGAC | | | |
| CD8 transmembrane | ATCTATATCTGGGCACCTCTCGCTGG | 1928 | IYIWAPLAGTCGVLLLSLVITLYCNHRNR | 1929 |
| | CACCTGTGGAGTCCTTCTGCTCAGCC | | RRVCKCPR | |
| | TGGTTATTACTCTGTACTGTAATCACC | | | |
| | GGAATCGCCGCCGCGTTTGTAAGTGT | | | |
| | CCCAGG | | | |
| Linker | GTCGAC | 1930 | VD | 1931 |
| CD3ζ | AGAGTGAAGTTCAGCAGGAGCGCAG | 1932 | RVKFSRSADAPAYQQGQNQLYNELNL | 1933 |
| | ACGCCCCCGCGTACCAGCAGGGCCA | | GRREEYDVLDKRRGRDPEMGGKPRRK | |
| | GAACCAGCTCTATAACGAGCTCAATC | | NPQEGLYNELQKDKMAEAYSEIGMKGE | |
| | TAGGACGAAGAGAGGAGTACGATGTT | | RRRGKGHDGLYQGLSTATKDTYDALH | |
| | TTGGACAAGAGACGTGGCCGGGACC | | MQALPPR | |
| | CTGAGATGGGGGGAAAGCCGAGAAG | | | |
| | GAAGAACCCTCAGGAAGGCCTGTACA | | | |
| | ATGAACTGCAGAAAGATAAGATGGCG | | | |
| | GAGGCCTACAGTGAGATTGGGATGAA | | | |
| | AGGCGAGCGCCGGAGGGGCAAGGG | | | |
| | GCACGATGGCCTTTACCAGGGTCTCA | | | |
| | GTACAGCCACCAAGGACACCTACGAC | | | |
| | GCCCTTCACATGCAAGCTCTTCCACC | | | |
| | TCGT | | | |

APPENDIX 26
pBP1466--pSFG-FKBPv.ΔC9.T2A-PSCA.Q.CD8stm.ζ.P2A-MC.FKBP_{wt}.FRB_{L}

| | | SEQ | | SEQ |
|---|---|---|---|---|
| | | ID | | ID |
| Fragment | Nucleotide | NO: | Peptide | NO: |
| Leader peptide | ATGCtcgagcaattgGAG | 1934 | MLEQLE | 1935 |
| FKBPv | GGAGTGCAGGTGGAGACTATTAGCCC | 1936 | GVQVETISPGDGRTFPKRGQTCVVHYT | 1937 |
| | CGGAGATGGCAGAACATTCCCCAAAA | | GMLEDGKKVDSSRDRNKPFKFMLGKQ | |
| | GAGGACAGACTTGCGTCGTGCATTAT | | EVIRGWEEGVAQMSVGQRAKLTISPDY | |
| | ACTGGAATGCTGGAAGACGGCAAGAA | | AYGATGHPGIIPPHATLVFDVELLKLE | |
| | GGTGGACAGCAGCCGGGACCGAAAC | | | |
| | AAGCCCTTCAAGTTCATGCTGGGGAA | | | |
| | GCAGGAAGTGATCCGGGGCTGGGAG | | | |
| | GAAGGAGTCGCACAGATGTCAGTGG | | | |
| | GACAGAGGGCCAAACTGACTATTAGC | | | |
| | CCAGACTACGCTTATGGAGCAACCGG | | | |
| | CCACCCCGGGATCATTCCCCCTCATG | | | |
| | CTACACTGGTCTTCGATGTGGAGCTG | | | |
| | CTGAAGCTGGAA | | | |
| Linker | TCAGGCGGTGGCTCAGGTGTGGAC | 1938 | SGGGSGVD | 1939 |
| Δcaspase9 | GGATTTGGTGATGTCGGTGCTCTTGA | 1940 | GFGDVGALESLRGNADLAYILSMEPCG | 1941 |
| | GAGTTTGAGGGGAAATGCAGATTTGG | | HCLIINNVNFCRESGLRTRTGSNIDCEK | |
| | CTTACATCCTGAGCATGGAGCCCTGT | | LRRRFSSLHFMVEVKGDLTAKKMVLAL | |
| | GGCCACTGCCTCATTATCAACAATGT | | LELARQDHGALDCCVVVILSHGCQASH | |
| | GAACTTCTGCCGTGAGTCCGGGCTCC | | LQFPGAVYGTDGCPVSVEKIVNIFNGTS | |
| | GCACCCGCACTGGCTCCAACATCGAC | | CPSLGGKPKLFFIQACGGEQKDHGFEV | |
| | TGTGAGAAGTTGCGGCGTCGCTTCTC | | ASTSPEDESPGSNPEPDATPFQEGLRT | |
| | CTCGCTGCATTTCATGGTGGAGGTGA | | FDQLDAISSLPTPSDIFVSYSTFPGFVS | |
| | AGGGCGACCTGACTGCCAAGAAAATG | | WRDPKSGSWYVETLDDIFEQWAHSED | |
| | GTGCTGGCTTTGCTGGAGCTGGCGCg | | LQSLLLRVANAVSVKGIYKQMPGCFNF | |
| | GCAGGACCACGGTGCTCTGGACTGC | | LRKKLFFKTSASRA | |
| | TGCGTGGTGGTCATTCTCTCTCACGG | | | |
| | CTGTCAGGCCAGCCACCTGCAGTTCC | | | |
| | CAGGGGCTGTCTACGGCACAGATGG | | | |
| | ATGCCCTGTGTCGGTCGAGAAGATTG | | | |
| | TGAACATCTTCAATGGGACCAGCTGC | | | |
| | CCCAGCCTGGGAGGGAAGCCCAAGC | | | |
| | TCTTTTTCATCCAGGCCTGTGGTGGG | | | |
| | GAGCAGAAAGAtCATGGGTTTGAGGT | | | |
| | GGCCTCCACTTCCCCTGAAGACGAGT | | | |
| | CCCCTGGCAGTAACCCCGAGCCAGAT | | | |
| | GCCACCCCGTTCCAGGAAGGTTTGAG | | | |
| | GACCTTCGACCAGCTGGACGCCATAT | | | |
| | CTAGTTTGCCCACACCCAGTGACATC | | | |
| | TTTGTGTCCTACTCTACTTTCCCAGGT | | | |
| | TTTGTTTCCTGGAGGGACCCCAAGAG | | | |
| | TGGCTCCTGGTACGTTGAGACCCTGG | | | |
| | ACGACATCTTTGAGCAGTGGGCTCAC | | | |
| | TCTGAAGACCTGCAGTCCCTCCTGCT | | | |
| | TAGGGTCGCTAATGCTGTTTCGGTGA | | | |
| | AAGGGATTTATAAACAGATGCCTGGT | | | |
| | TGCTTTAATTTCCTCCGGAAAAAACTT | | | |
| | TTCTTTAAAACATCAGCTAGCAGAGCC | | | |
| Linker | ggatctggaccgcGG | 1942 | GSGPR | 1943 |
| T2A | GAAGGCCGAGGGAGCCTGCTGACAT | 1944 | EGRGSLLTCGDVEENPGP | 1945 |
| | GTGGCGATGTGGAGGAAAACCCAGG | | | |
| | ACCA | | | |
| Linker | CCACGG | 1946 | PR | 1947 |
| Signal Peptide | ATGGAGTTTGGACTTTCTTGGTTGTTT | 1948 | MEFGLSWLFLVAILKGVQCSR | 1949 |
| | TTGGTGGCAATTCTGAAGGGTGTCCA | | | |
| | GTGTAGCAGG | | | |
| PSCA(A11) VL | GACATCCAACTGACGCAAAGCCCATC | 1950 | DIQLTQSPSTLSASMGDRVTITCSASSS | 1951 |
| | TACACTCAGCGCTAGCATGGGGGACA | | VRFIHWYQQKPGKAPKRLIYDTSKLAS | |
| | GGGTCACAATCACGTGCTCTGCCTCA | | GVPSRFSGSGSGTDFTLTISSLQPEDFA | |
| | AGTTCCGTTAGGTTTATCCATTGGTAT | | TYYCQQWGSSPFTFGQGTKVEIK | |
| | CAGCAGAAACCTGGAAAGGCCCCAAA | | | |
| | AAGACTGATCTATGATACCAGCAAGC | | | |
| | TGGCTTCCGGAGTGCCCTCAAGGTTC | | | |
| | TCAGGATCTGGCAGTGGGACCGATTT | | | |
| | CACCCTGACAATTAGCAGCCTTCAGC | | | |
| | CAGAGGATTTCGCAACCTATTACTGT | | | |
| | CAGCAATGGGGGTCCAGCCCATTCAC | | | |
| | TTTCGGCCAAGGAACAAAGGTGGAGA | | | |
| | TAAAA | | | |
| Flex | GGCGGAGGAAGCGGAGGTGGGGGC | 1952 | gggsgggg | 1953 |
| PSCA(A11) VH | GAGGTGCAGCTCGTGGAGTATGGCG | 1954 | EVQLVEYGGGLVQPGGSLRLSCAASG | 1955 |
| | GGGGCCTGGTGCAGCCTGGGGGTAG | | FNIKDYYIHWVRQAPGKGLEWVAWIDP | |
| | TCTGAGGCTCTCCTGCGCTGCCTCTG | | ENGDTEFVPKFQGRATMSADTSKNTAY | |
| | GCTTTAACATTAAAGACTACTACATAC | | LQMNSLRAEDTAVYYCKTGGFWGQGT | |
| | ATTGGGTGCGGCAGGCCCCAGGCAA | | LVTVSS | |
| | AGGGCTCGAATGGGTGGCCTGGATT | | | |
| | GACCCTGAGAATGGTGACACTGAGTT | | | |
| | TGTCCCCAAGTTTCAGGGCAGAGCCA | | | |
| | CCATGAGCGCTGACACAAGCAAAAAC | | | |
| | ACTGCTTATCTCCAAATGAATAGCCTG | | | |
| | CGAGCTGAAGATACAGCAGTCTATTA | | | |
| | CTGCAAGACGGGAGGATTCTGGGGC | | | |
| | CAGGGAACTCTGGTGACAGTTAGTTCC | | | |
| Linker | GGATCC | 1956 | gs | 1957 |
| CD34 epitope | GAACTTCCTACTCAGGGGACTTTCTC | 1958 | ELPTQGTFSNVSTNVS | 1959 |
| | AAACGTTAGCACAAACGTAAGT | | | |
| CD3ζ | AGAGTGAAGTTCAGCAGGAGCGCAG | 1960 | RVKFSRSADAPAYQQGQNQLYNELNL | 1961 |
| | ACGCCCCCGCGTACCAGCAGGGCCA | | GRREEYDVLDKRRGRDPEMGGKPRRK | |
| | GAACCAGCTCTATAACGAGCTCAATC | | NPQEGLYNELQKDKMAEAYSEIGMKGE | |
| | TAGGACGAAGAGAGGAGTACGATGTT | | RRRGKGHDGLYQGLSTATKDTYDALH | |
| | TTGGACAAGAGACGTGGCCGGGACC | | MQALPPR | |
| | CTGAGATGGGGGGAAAGCCGAGAAG | | | |
| | GAAGAACCCTCAGGAAGGCCTGTACA | | | |
| | ATGAACTGCAGAAAGATAAGATGGCG | | | |
| | GAGGCCTACAGTGAGATTGGGATGAA | | | |
| | AGGCGAGCGCCGGAGGGGCAAGGG | | | |
| | GCACGATGGCCTTTACCAGGGTCTCA | | | |
| | GTACAGCCACCAAGGACACCTACGAC | | | |
| | GCCCTTCACATGCAAGCTCTTCCACC | | | |
| | TCGT | | | |
| Linker | ggttccgga | 1962 | GSG | 1963 |
| T2A | GAAGGCCGAGGGAGCCTGCTGACAT | 1964 | EGRGSLLTCGDVEENPGP | 1965 |
| | GTGGCGATGTGGAGGAAAACCCAGG | | | |
| | ACCA | | | |
| Linker | ggatctgga | 1966 | GSG | 1967 |
| P2A | GCAACGAATTTTTCCCTGCTGAAACA | 1968 | ATNFSLLKQAGDVEENPGP | 1969 |
| | GGCAGGGGACGTAGAGGAAAATCCT | | | |
| | GGTCCT | | | |
| MyD88 | atggctgcaggaggtcccggcgcggggtctgcggcc | 1970 | MAAGGPGAGSAAPVSSTSSLPLAALN | 1971 |
| | ccggtctcctccacatcctcccttcccctggctgctctca | | MRVRRRLSLFLNVRTQVAADWTALAEE | |
| | acatgcgagtgcggcgccgcctgtctctgttcttgaacg | | MDFEYLEIRQLETQADPTGRLLDAWQG | |
| | tgcggacacaggtggcggccgactggaccgcgctgg | | RPGASVGRLLDLLTKLGRDDVLLELGP | |
| | cggaggagatggactttgagtacttggagatccggca | | SIEEDCQKYILKQQQEEAEKPLQVAAVD | |
| | actggagacacaagcggaccccactggcaggctgct | | SSVPRTAELAGITTLDDPLGHMPERFDA | |
| | ggacgcctggcagggacgccctggcgcctctgtagg | | FICYCPSDI | |
| | ccgactgctcgatctgcttaccaagctgggccgcgacg | | | |
| | acgtgctgctggagctgggacccagcattgaggagg | | | |
| | attgccaaaagtatatcttgaagcagcagcaggagga | | | |
| | ggctgagaagcctttacaggtggccgctgtagacagc | | | |
| | agtgtcccacggacagcagagctggcgggcatcacc | | | |
| | acacttgatgaccccctggggcatatgcctgagcgtttc | | | |
| | gatgccttcatctgctattgccccagcgacatc | | | |
| Linker | gtcgag | 1972 | VE | 1973 |
| CD40 | aaaaaggtggccaagaagccaaccaataaggcccc | 1974 | KKVAKKPTNKAPHPKQEPQEINFPDDL | 1975 |
| | ccaccccaagcaggagccccaggagatcaattttccc | | PGSNTAAPVQETLHGCQPVTQEDGKE | |
| | gacgatcttcctggctccaacactgctgctccagtgcag | | SRISVQERQ | |
| | gagactttacatggatgccaaccggtcacccaggagg | | | |
| | atggcaaagagagtcgcatctcagtgcaggagagac | | | |
| | ag | | | |
| Linker | gtcgag | 1976 | VE | 1977 |
| FKBP_{WT}′ | GGCGTCCAAGTCGAAACCATTAGTCC | 1978 | GVQVETISPGDGRTFPKRGQTCVVHYT | 1979 |
| | CGGCGATGGCAGAACATTTCCTACAA | | GMLEDGKKFDSSRDRNKPFKFMLGKQ | |
| | GGGGACAAACATGTGTCGTCCATTAT | | EVIRGWEEGVAQMSVGQRAKLTISPDY | |
| | ACAGGCATGTTGGAGGACGGCAAAAA | | AYGATGHPGIIPPHATLVFDVELLKLE | |
| | GTTCGACAGTAGTAGAGATCGCAATA | | | |
| | AACCTTTCAAATTCATGTTGGGAAAAC | | | |
| | AAGAAGTCATTAGGGGATGGGAGGA | | | |
| | GGGCGTGGCTCAAATGTCCGTCGGC | | | |
| | CAACGCGCTAAGCTCACCATCAGCCC | | | |
| | CGACTACGCATACGGCGCTACCGGA | | | |
| | CATCCCGGAATTATTCCCCCTCACGC | | | |
| | TACCTTGGTGTTTGACGTCGAACTGTT | | | |
| | GAAGCTCGAA | | | |
| Linker | gtcgag | 1980 | VE | 1981 |
| FRB_{L} | CAATTGGAAATGTGGCATGAAGGGTT | 1982 | QLEMWHEGLEEASRLYFGERNVKGMF | 1983 |
| | GGAAGAAGCTTCAAGGCTGTACTTCG | | EVLEPLHAMMERGPQTLKETSFNQAYG | |
| | GAGAGAGGAACGTGAAGGGCATGTTT | | RDLMEAQEWCRKYMKSGNVKDLLQA | |
| | GAGGTTCTTGAACCTCTGCACGCCAT | | WDLYYHVFRRISK | |
| | GATGGAACGGGGACCGCAGACACTG | | | |
| | AAAGAAACCTCTTTTAATCAGGCCTAC | | | |
| | GGCAGAGACCTGATGGAGGCCCAAG | | | |
| | AATGGTGTAGAAAGTATATGAAATCC | | | |
| | GGTAACGTGAAAGACCTGCTCCAGGC | | | |
| | CTGGGACCTTTATTACCATGTGTTCAG | | | |
| | GCGGATCAGTAAG | | | |
| STOPtail | TCAGGCGGTGGCTCAGGTCCGCGGT | 1984 | SGGGSGPR-stop | 1985 |
| | GA | | | |

APPENDIX 27
pBP1474--pSFG-FKBPv.ΔC9.T2A-αHER2.Q.CD8stm.ζ

| | | SEQ ID | | SEQ ID |
|---|---|---|---|---|
| Fragment | Nucleotide | NO: | Peptide | NO: |
| Leader peptide | ATGCtcgagcaattgGAG | 1986 | MLEQLE | 1987 |
| FKBPv | GGAGTGCAGGTGGAGACTATTAGCCC | 1988 | GVQVETISPGDGRTFPKRGQTCVVHYT | 1989 |
| | CGGAGATGGCAGAACATTCCCCAAAA | | GMLEDGKKVDSSRDRNKPFKFMLGKQ | |
| | GAGGACAGACTTGCGTCGTGCATTAT | | EVIRGWEEGVAQMSVGQRAKLTISPDY | |
| | ACTGGAATGCTGGAAGACGGCAAGAA | | AYGATGHPGIIPPHATLVFDVELLKLE | |
| | GGTGGACAGCAGCCGGGACCGAAAC | | | |
| | AAGCCCTTCAAGTTCATGCTGGGGAA | | | |
| | GCAGGAAGTGATCCGGGGCTGGGAG | | | |
| | GAAGGAGTCGCACAGATGTCAGTGG | | | |
| | GACAGAGGGCCAAACTGACTATTAGC | | | |
| | CCAGACTACGCTTATGGAGCAACCGG | | | |
| | CCACCCCGGGATCATTCCCCCTCATG | | | |
| | CTACACTGGTCTTCGATGTGGAGCTG | | | |
| | CTGAAGCTGGAA | | | |
| Linker | TCAGGCGGTGGCTCAGGTGTGGAC | 1990 | SGGGSGVD | 1991 |
| Δcaspase9 | GGATTTGGTGATGTCGGTGCTCTTGA | 1992 | GFGDVGALESLRGNADLAYILSMEPCG | 1993 |
| | GAGTTTGAGGGGAAATGCAGATTTGG | | HCLIINNVNFCRESGLRTRTGSNIDCEK | |
| | CTTACATCCTGAGCATGGAGCCCTGT | | LRRRFSSLHFMVEVKGDLTAKKMVLAL | |
| | GGCCACTGCCTCATTATCAACAATGT | | LELARQDHGALDCCVVVILSHGCQASH | |
| | GAACTTCTGCCGTGAGTCCGGGCTCC | | LQFPGAVYGTDGCPVSVEKIVNIFNGTS | |
| | GCACCCGCACTGGCTCCAACATCGAC | | CPSLGGKPKLFFIQACGGEQKDHGFEV | |
| | TGTGAGAAGTTGCGGCGTCGCTTCTC | | ASTSPEDESPGSNPEPDATPFQEGLRT | |
| | CTCGCTGCATTTCATGGTGGAGGTGA | | FDQLDAISSLPTPSDIFVSYSTFPGFVS | |
| | AGGGCGACCTGACTGCCAAGAAAATG | | WRDPKSGSWYVETLDDIFEQWAHSED | |
| | GTGCTGGCTTTGCTGGAGCTGGCGCg | | LQSLLLRVANAVSVKGIYKQMPGCFNF | |
| | GCAGGACCACGGTGCTCTGGACTGC | | LRKKLFFKTSASRA | |
| | TGCGTGGTGGTCATTCTCTCTCACGG | | | |
| | CTGTCAGGCCAGCCACCTGCAGTTCC | | | |
| | CAGGGGCTGTCTACGGCACAGATGG | | | |
| | ATGCCCTGTGTCGGTCGAGAAGATTG | | | |
| | TGAACATCTTCAATGGGACCAGCTGC | | | |
| | CCCAGCCTGGGAGGGAAGCCCAAGC | | | |
| | TCTTTTTCATCCAGGCCTGTGGTGGG | | | |
| | GAGCAGAAAGAtCATGGGTTTGAGGT | | | |
| | GGCCTCCACTTCCCCTGAAGACGAGT | | | |
| | CCCCTGGCAGTAACCCCGAGCCAGAT | | | |
| | GCCACCCCGTTCCAGGAAGGTTTGAG | | | |
| | GACCTTCGACCAGCTGGACGCCATAT | | | |
| | CTAGTTTGCCCACACCCAGTGACATC | | | |
| | TTTGTGTCCTACTCTACTTTCCCAGGT | | | |
| | TTTGTTTCCTGGAGGGACCCCAAGAG | | | |
| | TGGCTCCTGGTACGTTGAGACCCTGG | | | |
| | ACGACATCTTTGAGCAGTGGGCTCAC | | | |
| | TCTGAAGACCTGCAGTCCCTCCTGCT | | | |
| | TAGGGTCGCTAATGCTGTTTCGGTGA | | | |
| | AAGGGATTTATAAACAGATGCCTGGT | | | |
| | TGCTTTAATTTCCTCCGGAAAAAACTT | | | |
| | TTCTTTAAAACATCAGCTAGCAGAGCC | | | |
| Linker | ggatctggaccgcGG | 1994 | GSGPR | 1995 |
| T2A | GAAGGCCGAGGGAGCCTGCTGACAT | 1996 | EGRGSLLTCGDVEENPGP | 1997 |
| | GTGGCGATGTGGAGGAAAACCCAGG | | | |
| | ACCA | | | |
| Linker | GCATGCGCCACC | 1998 | ACAT | 1999 |
| Signal Peptide | ATGGAGTTTGGGTTGTCATGGTTGTTT | 2000 | MEFGLSWLFLVAILKGVQCSR | 2001 |
| | CTCGTCGCTATTCTCAAAGGTGTACA | | | |
| | ATGCTCCCGC | | | |
| HER2(FRP5) VH | GAAGTCCAATTGCAACAGTCAGGCCC | 2002 | EVQLQQSGPELKKPGETVKISCKASGY | 2003 |
| | CGAATTGAAAAAGCCCGGCGAAACAG | | PFTNYGMNWVKQAPGQGLKWMGWIN | |
| | TGAAGATATCTTGTAAAGCCTCCGGTT | | TSTGESTFADDFKGRFDFSLETSANTA | |
| | ACCCTTTTACGAACTATGGAATGAACT | | YLQINNLKSEDMATYFCARWEVYHGYV | |
| | GGGTCAAACAAGCCCCTGGACAGGG | | PYWGQGTTVTVSS | |
| | ATTGAAGTGGATGGGATGGATCAATA | | | |
| | CATCAACAGGCGAGTCTACCTTCGCA | | | |
| | GATGATTTCAAAGGTCGCTTTGACTTC | | | |
| | TCACTGGAGACCAGTGCAAATACCGC | | | |
| | CTACCTTCAGATTAACAATCTTAAAAG | | | |
| | CGAGGATATGGCAACCTACTTTTGCG | | | |
| | CAAGATGGGAAGTTTATCACGGGTAC | | | |
| | GTGCCATACTGGGGACAAGGAACGA | | | |
| | CAGTGACAGTTAGTAGC | | | |
| Flex | GGCGGTGGAGGCTCCGGTGGAGGCG | 2004 | GGGGSGGGGSGGGGS | 2005 |
| | GCTCTGGAGGAGGAGGTTCA | | | |
| HER2(FRP5) VL | GACATCCAATTGACACAATCACACAAA | 2006 | EVQLVEYGGGLVQPGGSLRLSCAASG | 2007 |
| | TTTCTCTCAACTTCTGTAGGAGACAGA | | FNIKDYYIHWVRQAPGKGLEWVAWIDP | |
| | GTGAGCATAACCTGCAAAGCATCCCA | | ENGDTEFVPKFQGRATMSADTSKNTAY | |
| | GGACGTGTACAATGCTGTGGCTTGGT | | LQMNSLRAEDTAVYYCKTGGFWGQGT | |
| | ACCAACAGAAGCCTGGACAATCCCCA | | LVTVSS | |
| | AAATTGCTGATTTATTCTGCCTCTAGT | | | |
| | AGGTACACTGGGGTACCTTCTCGGTT | | | |
| | TACGGGCTCTGGGTCCGGACCAGATT | | | |
| | TCACGTTCACAATCAGTTCCGTTCAAG | | | |
| | CTGAAGACCTCGCTGTTTATTTTTGCC | | | |
| | AGCAGCACTTCCGAACCCCTTTTACTT | | | |
| | TTGGCTCAGGCACTAAGTTGGAAATC | | | |
| | AAGGCTTTG | | | |
| Linker | atgcat | 2008 | MH | 2009 |
| CD34 epitope | GAACTTCCTACTCAGGGGACTTTCTC | 2010 | ELPTQGTFSNVSTNVS | 2011 |
| | AAACGTTAGCACAAACGTAAGT | | | |
| CD3ζ | AGAGTGAAGTTCAGCAGGAGCGCAG | 2012 | RVKFSRSADAPAYQQGQNQLYNELNL | 2013 |
| | ACGCCCCCGCGTACCAGCAGGGCCA | | GRREEYDVLDKRRGRDPEMGGKPRRK | |
| | GAACCAGCTCTATAACGAGCTCAATC | | NPQEGLYNELQKDKMAEAYSEIGMKGE | |
| | TAGGACGAAGAGAGGAGTACGATGTT | | RRRGKGHDGLYQGLSTATKDTYDALH | |
| | TTGGACAAGAGACGTGGCCGGGACC | | MQALPPR | |
| | CTGAGATGGGGGGAAAGCCGAGAAG | | | |
| | GAAGAACCCTCAGGAAGGCCTGTACA | | | |
| | ATGAACTGCAGAAAGATAAGATGGCG | | | |
| | GAGGCCTACAGTGAGATTGGGATGAA | | | |
| | AGGCGAGCGCCGGAGGGGCAAGGG | | | |
| | GCACGATGGCCTTTACCAGGGTCTCA | | | |
| | GTACAGCCACCAAGGACACCTACGAC | | | |
| | GCCCTTCACATGCAAGCTCTTCCACC | | | |
| | TCGT | | | |

APPENDIX 28
pBP1475--pSFG-FKBPv.ΔC9.T2A-αPSCA.Q.CD8stm.ζ

| | | SEQ ID | | SEQ ID |
|---|---|---|---|---|
| Fragment | Nucleotide | NO: | Peptide | NO: |
| Leader peptide | ATGCtcgagcaattgGAG | 2014 | MLEQLE | 2015 |
| FKBPv | GGAGTGCAGGTGGAGACTATTAGCCC | 2016 | GVQVETISPGDGRTFPKRGQTCVVHYT | 2017 |
| | CGGAGATGGCAGAACATTCCCCAAAA | | GMLEDGKKVDSSRDRNKPFKFMLGKQ | |
| | GAGGACAGACTTGCGTCGTGCATTAT | | EVIRGWEEGVAQMSVGQRAKLTISPDY | |
| | ACTGGAATGCTGGAAGACGGCAAGAA | | AYGATGHPGIIPPHATLVFDVELLKLE | |
| | GGTGGACAGCAGCCGGGACCGAAAC | | | |
| | AAGCCCTTCAAGTTCATGCTGGGGAA | | | |
| | GCAGGAAGTGATCCGGGGCTGGGAG | | | |
| | GAAGGAGTCGCACAGATGTCAGTGG | | | |
| | GACAGAGGGCCAAACTGACTATTAGC | | | |
| | CCAGACTACGCTTATGGAGCAACCGG | | | |
| | CCACCCCGGGATCATTCCCCCTCATG | | | |
| | CTACACTGGTCTTCGATGTGGAGCTG | | | |
| | CTGAAGCTGGAA | | | |
| Linker | TCAGGCGGTGGCTCAGGTGTGGAC | 2018 | SGGGSGVD | 2019 |
| Δcaspase9 | GGATTTGGTGATGTCGGTGCTCTTGA | 2020 | GFGDVGALESLRGNADLAYILSMEPCG | 2021 |
| | GAGTTTGAGGGGAAATGCAGATTTGG | | HCLIINNVNFCRESGLRTRTGSNIDCEK | |
| | CTTACATCCTGAGCATGGAGCCCTGT | | LRRRFSSLHFMVEVKGDLTAKKMVLAL | |
| | GGCCACTGCCTCATTATCAACAATGT | | LELARQDHGALDCCVVVILSHGCQASH | |
| | GAACTTCTGCCGTGAGTCCGGGCTCC | | LQFPGAVYGTDGCPVSVEKIVNIFNGTS | |
| | GCACCCGCACTGGCTCCAACATCGAC | | CPSLGGKPKLFFIQACGGEQKDHGFEV | |
| | TGTGAGAAGTTGCGGCGTCGCTTCTC | | ASTSPEDESPGSNPEPDATPFQEGLRT | |
| | CTCGCTGCATTTCATGGTGGAGGTGA | | FDQLDAISSLPTPSDIFVSYSTFPGFVS | |
| | AGGGCGACCTGACTGCCAAGAAAATG | | WRDPKSGSWYVETLDDIFEQWAHSED | |
| | GTGCTGGCTTTGCTGGAGCTGGCGCg | | LQSLLLRVANAVSVKGIYKQMPGCFNF | |
| | GCAGGACCACGGTGCTCTGGACTGC | | LRKKLFFKTSASRA | |
| | TGCGTGGTGGTCATTCTCTCTCACGG | | | |
| | CTGTCAGGCCAGCCACCTGCAGTTCC | | | |
| | CAGGGGCTGTCTACGGCACAGATGG | | | |
| | ATGCCCTGTGTCGGTCGAGAAGATTG | | | |
| | TGAACATCTTCAATGGGACCAGCTGC | | | |
| | CCCAGCCTGGGAGGGAAGCCCAAGC | | | |
| | TCTTTTTCATCCAGGCCTGTGGTGGG | | | |
| | GAGCAGAAAGAtCATGGGTTTGAGGT | | | |
| | GGCCTCCACTTCCCCTGAAGACGAGT | | | |
| | CCCCTGGCAGTAACCCCGAGCCAGAT | | | |
| | GCCACCCCGTTCCAGGAAGGTTTGAG | | | |
| | GACCTTCGACCAGCTGGACGCCATAT | | | |
| | CTAGTTTGCCCACACCCAGTGACATC | | | |
| | TTTGTGTCCTACTCTACTTTCCCAGGT | | | |
| | TTTGTTTCCTGGAGGGACCCCAAGAG | | | |
| | TGGCTCCTGGTACGTTGAGACCCTGG | | | |
| | ACGACATCTTTGAGCAGTGGGCTCAC | | | |
| | TCTGAAGACCTGCAGTCCCTCCTGCT | | | |
| | TAGGGTCGCTAATGCTGTTTCGGTGA | | | |
| | AAGGGATTTATAAACAGATGCCTGGT | | | |
| | TGCTTTAATTTCCTCCGGAAAAAACTT | | | |
| | TTCTTTAAAACATCAGCTAGCAGAGCC | | | |
| Linker | ggatctggaccgcGG | 2022 | GSGPR | 2023 |
| T2A | GAAGGCCGAGGGAGCCTGCTGACAT | 2024 | EGRGSLLTCGDVEENPGP | 2025 |
| | GTGGCGATGTGGAGGAAAACCCAGG | | | |
| | ACCA | | | |
| Linker | CCATGG | 2026 | PW | 2027 |
| Signal Peptide | ATGGAGTTTGGACTTTCTTGGTTGTTT | 2028 | MEFGLSWLFLVAILKGVQCSR | 2029 |
| | TTGGTGGCAATTCTGAAGGGTGTCCA | | | |
| | GTGTAGCAGG | | | |
| PSCA(A11) VL | GACATCCAACTGACGCAAAGCCCATC | 2030 | DIQLTQSPSTLSASMGDRVTITCSASSS | 2031 |
| | TACACTCAGCGCTAGCATGGGGGACA | | VRFIHWYQQKPGKAPKRLIYDTSKLAS | |
| | GGGTCACAATCACGTGCTCTGCCTCA | | GVPSRFSGSGSGTDFTLTISSLQPEDFA | |
| | AGTTCCGTTAGGTTTATCCATTGGTAT | | TYYCQQWGSSPFTFGQGTKVEIK | |
| | CAGCAGAAACCTGGAAAGGCCCCAAA | | | |
| | AAGACTGATCTATGATACCAGCAAGC | | | |
| | TGGCTTCCGGAGTGCCCTCAAGGTTC | | | |
| | TCAGGATCTGGCAGTGGGACCGATTT | | | |
| | CACCCTGACAATTAGCAGCCTTCAGC | | | |
| | CAGAGGATTTCGCAACCTATTACTGT | | | |
| | CAGCAATGGGGGTCCAGCCCATTCAC | | | |
| | TTTCGGCCAAGGAACAAAGGTGGAGA | | | |
| | TAAAA | | | |
| Flex | GGCGGAGGAAGCGGAGGTGGGGGC | 2032 | gggsgggg | 2033 |
| PSCA(A11) VH | GAGGTGCAGCTCGTGGAGTATGGCG | 2034 | EVQLVEYGGGLVQPGGSLRLSCAASG | 2035 |
| | GGGGCCTGGTGCAGCCTGGGGGTAG | | FNIKDYYIHWVRQAPGKGLEWVAWIDP | |
| | TCTGAGGCTCTCCTGCGCTGCCTCTG | | ENGDTEFVPKFQGRATMSADTSKNTAY | |
| | GCTTTAACATTAAAGACTACTACATAC | | LQMNSLRAEDTAVYYCKTGGFWGQGT | |
| | ATTGGGTGCGGCAGGCCCCAGGCAA | | LVTVSS | |
| | AGGGCTCGAATGGGTGGCCTGGATT | | | |
| | GACCCTGAGAATGGTGACACTGAGTT | | | |
| | TGTCCCCAAGTTTCAGGGCAGAGCCA | | | |
| | CCATGAGCGCTGACACAAGCAAAAAC | | | |
| | ACTGCTTATCTCCAAATGAATAGCCTG | | | |
| | CGAGCTGAAGATACAGCAGTCTATTA | | | |
| | CTGCAAGACGGGAGGATTCTGGGGC | | | |
| | CAGGGAACTCTGGTGACAGTTAGTTCC | | | |
| Linker | GGATCC | 2036 | gs | 2037 |
| CD34 epitope | GAACTTCCTACTCAGGGGACTTTCTC | 2038 | ELPTQGTFSNVSTNVS | 2039 |
| | AAACGTTAGCACAAACGTAAGT | | | |
| CD8 stalk | CCCGCCCCAAGACCCCCCACACCTG | 2040 | PAPRPPTPAPTIASQPLSLRPEACRPAA | 2041 |
| | CGCCGACCATTGCTTCTCAACCCCTG | | GGAVHTRGLDFACD | |
| | AGTTTGAGACCCGAGGCCTGCCGGC | | | |
| | CAGCTGCCGGCGGGGCCGTGCATAC | | | |
| | AAGAGGACTCGATTTCGCTTGCGAC | | | |
| CD8 transmembrane | ATCTATATCTGGGCACCTCTCGCTGG | 2042 | IYIWAPLAGTCGVLLLSLVITLYCNHRNR | 2043 |
| | CACCTGTGGAGTCCTTCTGCTCAGCC | | RRVCKCPR | |
| | TGGTTATTACTCTGTACTGTAATCACC | | | |
| | GGAATCGCCGCCGCGTTTGTAAGTGT | | | |
| | CCCAGG | | | |
| Linker | GTCGAC | 2044 | VD | 2045 |
| CD3ζ | AGAGTGAAGTTCAGCAGGAGCGCAG | 2046 | RVKFSRSADAPAYQQGQNQLYNELNL | 2047 |
| | ACGCCCCCGCGTACCAGCAGGGCCA | | GRREEYDVLDKRRGRDPEMGGKPRRK | |
| | GAACCAGCTCTATAACGAGCTCAATC | | NPQEGLYNELQKDKMAEAYSEIGMKGE | |
| | TAGGACGAAGAGAGGAGTACGATGTT | | RRRGKGHDGLYQGLSTATKDTYDALH | |
| | TTGGACAAGAGACGTGGCCGGGACC | | MQALPPR | |
| | CTGAGATGGGGGGAAAGCCGAGAAG | | | |
| | GAAGAACCCTCAGGAAGGCCTGTACA | | | |
| | ATGAACTGCAGAAAGATAAGATGGCG | | | |
| | GAGGCCTACAGTGAGATTGGGATGAA | | | |
| | AGGCGAGCGCCGGAGGGGCAAGGG | | | |
| | GCACGATGGCCTTTACCAGGGTCTCA | | | |
| | GTACAGCCACCAAGGACACCTACGAC | | | |
| | GCCCTTCACATGCAAGCTCTTCCACC | | | |
| | TCGT | | | |

APPENDIX 29
pBP1488--pSFG-FRB_{L}.FKBP_{wt}.MC-T2A-αPSCA.Q.CD8stm.ζ

| | | SEQ ID | | SEQ ID |
|---|---|---|---|---|
| Fragment | Nucleotide | NO: | Peptide | NO: |
| FRB_{L} | ATGCAATTGGAAATGTGGCATGAAGG | 2048 | MQLEMWHEGLEEASRLYFGERNVKGM | 2049 |
| | GTTGGAAGAAGCTTCAAGGCTGTACT | | FEVLEPLHAMMERGPQTLKETSFNQAY | |
| | TCGGAGAGAGGAACGTGAAGGGCAT | | GRDLMEAQEWCRKYMKSGNVKDLLQA | |
| | GTTTGAGGTTCTTGAACCTCTGCACG | | WDLYYHVFRRISK | |
| | CCATGATGGAACGGGGACCGCAGAC | | | |
| | ACTGAAAGAAACCTCTTTTAATCAGGC | | | |
| | CTACGGCAGAGACCTGATGGAGGCC | | | |
| | CAAGAATGGTGTAGAAAGTATATGAA | | | |
| | ATCCGGTAACGTGAAAGACCTGCTCC | | | |
| | AGGCCTGGGACCTTTATTACCATGTG | | | |
| | TTCAGGCGGATCAGTAAG | | | |
| Linker | TCAGGCGGTGGCAGCGGCCAATTG | 2050 | sgggsgql | 2051 |
| FKBP_{WT}′ | GGaGTCCAAGTCGAAACCATTAGTCC | 2052 | GVQVETISPGDGRTFPKRGQTCVVHYT | 2053 |
| | CGGCGATGGCAGAACATTTCCTACAA | | GMLEDGKKFDSSRDRNKPFKFMLGKQ | |
| | GGGGACAAACATGTGTCGTCCATTAT | | EVIRGWEEGVAQMSVGQRAKLTISPDY | |
| | ACAGGCATGTTGGAGGACGGCAAAAA | | AYGATGHPGIIPPHATLVFDVELLKLE | |
| | GTTCGACAGTAGTAGAGATCGCAATA | | | |
| | AACCTTTCAAATTCATGTTGGGAAAAC | | | |
| | AAGAAGTCATTAGGGGATGGGAGGA | | | |
| | GGGCGTGGCTCAAATGTCCGTCGGC | | | |
| | CAACGCGCTAAGCTCACCATCAGCCC | | | |
| | CGACTACGCATACGGCGCTACCGGA | | | |
| | CATCCCGGAATTATTCCCCCTCACGC | | | |
| | TACCTTGGTGTTTGACGTCGAACTGTT | | | |
| | GAAGCTCGAA | | | |
| Linker | GGAAGCATGCGGATCGGA | 2054 | gsmrig | 2055 |
| MyD88 | atggctgcaggaggtcccggcgcggggtctgcggcc | 2056 | MAAGGPGAGSAAPVSSTSSLPLAALN | 2057 |
| | ccggtctcctccacatcctcccttcccctggctgctctca | | MRVRRRLSLFLNVRTQVAADWTALAEE | |
| | acatgcgagtgcggcgccgcctgtctctgttcttgaacg | | MDFEYLEIRQLETQADPTGRLLDAWQG | |
| | tgcggacacaggtggcggccgactggaccgcgctgg | | RPGASVGRLLDLLTKLGRDDVLLELGP | |
| | cggaggagatggactttgagtacttggagatccggca | | SIEEDCQKYILKQQQEEAEKPLQVAAVD | |
| | actggagacacaagcggaccccactggcaggctgct | | SSVPRTAELAGITTLDDPLGHMPERFDA | |
| | ggacgcctggcagggacgccctggcgcctctgtagg | | FICYCPSDI | |
| | ccgactgctcgatctgcttaccaagctgggccgcgacg | | | |
| | acgtgctgctggagctgggacccagcattgaggagg | | | |
| | attgccaaaagtatatcttgaagcagcagcaggagga | | | |
| | ggctgagaagcctttacaggtggccgctgtagacagc | | | |
| | agtgtcccacggacagcagagctggcgggcatcacc | | | |
| | acacttgatgaccccctggggcatatgcctgagcgtttc | | | |
| | gatgccttcatctgctattgccccagcgacatc | | | |
| Linker | gtcgag | 2058 | VE | 2059 |
| CD40 | aaaaaggtggccaagaagccaaccaataaggcccc | 2060 | KKVAKKPTNKAPHPKQEPQEINFPDDL | 2061 |
| | ccaccccaagcaggagccccaggagatcaattttccc | | PGSNTAAPVQETLHGCQPVTQEDGKE | |
| | gacgatcttcctggctccaacactgctgctccagtgcag | | SRISVQERQ | |
| | gagactttacatggatgccaaccggtcacccaggagg | | | |
| | atggcaaagagagtcgcatctcagtgcaggagagac | | | |
| | ag | | | |
| Linker | GGCAGTGGGCCGCGG | 2062 | gsgpr | 2063 |
| T2A | GAAGGCCGAGGGAGCCTGCTGACAT | 2064 | EGRGSLLTCGDVEENPGP | 2065 |
| | GTGGCGATGTGGAGGAAAACCCAGG | | | |
| | ACCA | | | |
| Linker | CCATGG | 2066 | PW | 2067 |
| Signal Peptide | ATGGAGTTTGGACTTTCTTGGTTGTTT | 2068 | MEFGLSWLFLVAILKGVQCSR | 2069 |
| | TTGGTGGCAATTCTGAAGGGTGTCCA | | | |
| | GTGTAGCAGG | | | |
| PSCA(A11) VL | GACATCCAACTGACGCAAAGCCCATC | 2070 | DIQLTQSPSTLSASMGDRVTITCSASSS | 2071 |
| | TACACTCAGCGCTAGCATGGGGGACA | | VRFIHWYQQKPGKAPKRLIYDTSKLAS | |
| | GGGTCACAATCACGTGCTCTGCCTCA | | GVPSRFSGSGSGTDFTLTISSLQPEDFA | |
| | AGTTCCGTTAGGTTTATCCATTGGTAT | | TYYCQQWGSSPFTFGQGTKVEIK | |
| | CAGCAGAAACCTGGAAAGGCCCCAAA | | | |
| | AAGACTGATCTATGATACCAGCAAGC | | | |
| | TGGCTTCCGGAGTGCCCTCAAGGTTC | | | |
| | TCAGGATCTGGCAGTGGGACCGATTT | | | |
| | CACCCTGACAATTAGCAGCCTTCAGC | | | |
| | CAGAGGATTTCGCAACCTATTACTGT | | | |
| | CAGCAATGGGGGTCCAGCCCATTCAC | | | |
| | TTTCGGCCAAGGAACAAAGGTGGAGA | | | |
| | TAAAA | | | |
| Flex | GGCGGAGGAAGCGGAGGTGGGGGC | 2072 | gggsgggg | 2073 |
| PSCA(A11) VH | GAGGTGCAGCTCGTGGAGTATGGCG | 2074 | EVQLVEYGGGLVQPGGSLRLSCAASG | 2075 |
| | GGGGCCTGGTGCAGCCTGGGGGTAG | | FNIKDYYIHWVRQAPGKGLEWVAWIDP | |
| | TCTGAGGCTCTCCTGCGCTGCCTCTG | | ENGDTEFVPKFQGRATMSADTSKNTAY | |
| | GCTTTAACATTAAAGACTACTACATAC | | LQMNSLRAEDTAVYYCKTGGFWGQGT | |
| | ATTGGGTGCGGCAGGCCCCAGGCAA | | LVTVSS | |
| | AGGGCTCGAATGGGTGGCCTGGATT | | | |
| | GACCCTGAGAATGGTGACACTGAGTT | | | |
| | TGTCCCCAAGTTTCAGGGCAGAGCCA | | | |
| | CCATGAGCGCTGACACAAGCAAAAAC | | | |
| | ACTGCTTATCTCCAAATGAATAGCCTG | | | |
| | CGAGCTGAAGATACAGCAGTCTATTA | | | |
| | CTGCAAGACGGGAGGATTCTGGGGC | | | |
| | CAGGGAACTCTGGTGACAGTTAGTTCC | | | |
| Linker | GGATCC | 2076 | gs | 2077 |
| CD34 epitope | GAACTTCCTACTCAGGGGACTTTCTC | 2078 | ELPTQGTFSNVSTNVS | 2079 |
| | AAACGTTAGCACAAACGTAAGT | | | |
| CD8 stalk | CCCGCCCCAAGACCCCCCACACCTG | 2080 | PAPRPPTPAPTIASQPLSLRPEACRPAA | 2081 |
| | CGCCGACCATTGCTTCTCAACCCCTG | | GGAVHTRGLDFACD | |
| | AGTTTGAGACCCGAGGCCTGCCGGC | | | |
| | CAGCTGCCGGCGGGGCCGTGCATAC | | | |
| | AAGAGGACTCGATTTCGCTTGCGAC | | | |
| CD8 transmembrane | ATCTATATCTGGGCACCTCTCGCTGG | 2082 | IYIWAPLAGTCGVLLLSLVITLYCNHRNR | 2083 |
| | CACCTGTGGAGTCCTTCTGCTCAGCC | | RRVCKCPR | |
| | TGGTTATTACTCTGTACTGTAATCACC | | | |
| | GGAATCGCCGCCGCGTTTGTAAGTGT | | | |
| | CCCAGG | | | |
| Linker | GTCGAC | 2084 | VD | 2085 |
| CD3ζ | AGAGTGAAGTTCAGCAGGAGCGCAG | 2086 | RVKFSRSADAPAYQQGQNQLYNELNL | 2087 |
| | ACGCCCCCGCGTACCAGCAGGGCCA | | GRREEYDVLDKRRGRDPEMGGKPRRK | |
| | GAACCAGCTCTATAACGAGCTCAATC | | NPQEGLYNELQKDKMAEAYSEIGMKGE | |
| | TAGGACGAAGAGAGGAGTACGATGTT | | RRRGKGHDGLYQGLSTATKDTYDALH | |
| | TTGGACAAGAGACGTGGCCGGGACC | | MQALPPR | |
| | CTGAGATGGGGGGAAAGCCGAGAAG | | | |
| | GAAGAACCCTCAGGAAGGCCTGTACA | | | |
| | ATGAACTGCAGAAAGATAAGATGGCG | | | |
| | GAGGCCTACAGTGAGATTGGGATGAA | | | |
| | AGGCGAGCGCCGGAGGGGCAAGGG | | | |
| | GCACGATGGCCTTTACCAGGGTCTCA | | | |
| | GTACAGCCACCAAGGACACCTACGAC | | | |
| | GCCCTTCACATGCAAGCTCTTCCACC | | | |
| | TCGT | | | |

APPENDIX 30
pBP1491—pSFG--FKBPv.ΔC9.P2A.MC.FKBP_{wt}.FRB_{L}.T2A-αHER2.Q.CD8stm.ζ

| | | SEQ ID | | |
|---|---|---|---|---|
| Fragment | Nucleotide | NO: | Peptide | SEQ ID NO: |
| Linker | atgcatATGCTGGAG | 2088 | MHMLE | 2089 |
| FKBPv | GGAGTGCAGGTGGAGACTATTAGCCC | 2090 | GVQVETISPGDGRTFPKRGQTCVVHYT | 2091 |
| | CGGAGATGGCAGAACATTCCCCAAAA | | GMLEDGKKVDSSRDRNKPFKFMLGKQ | |
| | GAGGACAGACTTGCGTCGTGCATTAT | | EVIRGWEEGVAQMSVGQRAKLTISPDY | |
| | ACTGGAATGCTGGAAGACGGCAAGAA | | AYGATGHPGIIPPHATLVFDVELLKLE | |
| | GGTGGACAGCAGCCGGGACCGAAAC | | | |
| | AAGCCCTTCAAGTTCATGCTGGGGAA | | | |
| | GCAGGAAGTGATCCGGGGCTGGGAG | | | |
| | GAAGGAGTCGCACAGATGTCAGTGG | | | |
| | GACAGAGGGCCAAACTGACTATTAGC | | | |
| | CCAGACTACGCTTATGGAGCAACCGG | | | |
| | CCACCCCGGGATCATTCCCCCTCATG | | | |
| | CTACACTGGTCTTCGATGTGGAGCTG | | | |
| | CTGAAGCTGGAA | | | |
| Linker | TCAGGCGGTGGCTCAGGTGTGGAC | 2092 | SGGGSGVD | 2093 |
| Δcaspase9 | GGATTTGGTGATGTCGGTGCTCTTGA | 2094 | GFGDVGALESLRGNADLAYILSMEPCG | 2095 |
| | GAGTTTGAGGGGAAATGCAGATTTGG | | HCLIINNVNFCRESGLRTRTGSNIDCEK | |
| | CTTACATCCTGAGCATGGAGCCCTGT | | LRRRFSSLHFMVEVKGDLTAKKMVLAL | |
| | GGCCACTGCCTCATTATCAACAATGT | | LELARQDHGALDCCVVVILSHGCQASH | |
| | GAACTTCTGCCGTGAGTCCGGGCTCC | | LQFPGAVYGTDGCPVSVEKIVNIFNGTS | |
| | GCACCCGCACTGGCTCCAACATCGAC | | CPSLGGKPKLFFIQACGGEQKDHGFEV | |
| | TGTGAGAAGTTGCGGCGTCGCTTCTC | | ASTSPEDESPGSNPEPDATPFQEGLRT | |
| | CTCGCTGCATTTCATGGTGGAGGTGA | | FDQLDAISSLPTPSDIFVSYSTFPGFVS | |
| | AGGGCGACCTGACTGCCAAGAAAATG | | WRDPKSGSWYVETLDDIFEQWAHSED | |
| | GTGCTGGCTTTGCTGGAGCTGGCGCg | | LQSLLLRVANAVSVKGIYKQMPGCFNF | |
| | GCAGGACCACGGTGCTCTGGACTGC | | LRKKLFFKTSASRA | |
| | TGCGTGGTGGTCATTCTCTCTCACGG | | | |
| | CTGTCAGGCCAGCCACCTGCAGTTCC | | | |
| | CAGGGGCTGTCTACGGCACAGATGG | | | |
| | ATGCCCTGTGTCGGTCGAGAAGATTG | | | |
| | TGAACATCTTCAATGGGACCAGCTGC | | | |
| | CCCAGCCTGGGAGGGAAGCCCAAGC | | | |
| | TCTTTTTCATCCAGGCCTGTGGTGGG | | | |
| | GAGCAGAAAGAtCATGGGTTTGAGGT | | | |
| | GGCCTCCACTTCCCCTGAAGACGAGT | | | |
| | CCCCTGGCAGTAACCCCGAGCCAGAT | | | |
| | GCCACCCCGTTCCAGGAAGGTTTGAG | | | |
| | GACCTTCGACCAGCTGGACGCCATAT | | | |
| | CTAGTTTGCCCACACCCAGTGACATC | | | |
| | TTTGTGTCCTACTCTACTTTCCCAGGT | | | |
| | TTTGTTTCCTGGAGGGACCCCAAGAG | | | |
| | TGGCTCCTGGTACGTTGAGACCCTGG | | | |
| | ACGACATCTTTGAGCAGTGGGCTCAC | | | |
| | TCTGAAGACCTGCAGTCCCTCCTGCT | | | |
| | TAGGGTCGCTAATGCTGTTTCGGTGA | | | |
| | AAGGGATTTATAAACAGATGCCTGGT | | | |
| | TGCTTTAATTTCCTCCGGAAAAAACTT | | | |
| | TTCTTTAAAACATCAGCTAGCAGAGCC | | | |
| Linker | agcggCCGCaggtagcggg | 2096 | aaaGSG | 2097 |
| MyD88 | atggctgcaggaggtcccggcgcggggtctgcggcc | 2098 | MAAGGPGAGSAAPVSSTSSLPLAALN | 2099 |
| | ccggtctcctccacatcctcccttcccctggctgctctca | | MRVRRRLSLFLNVRTQVAADVVTALAEE | |
| | acatgcgagtgcggcgccgcctgtctctgttcttgaacg | | MDFEYLEIRQLETQADPTGRLLDAWQG | |
| | tgcggacacaggtggcggccgactggaccgcgctgg | | RPGASVGRLLDLLTKLGRDDVLLELGP | |
| | cggaggagatggactttgagtacttggagatccggca | | SIEEDCQKYILKQQQEEAEKPLQVAAVD | |
| | actggagacacaagcggaccccactggcaggctgct | | SSVPRTAELAGITTLDDPLGHMPERFDA | |
| | ggacgcctggcagggacgccctggcgcctctgtagg | | FICYCPSDI | |
| | ccgactgctcgatctgcttaccaagctgggccgcgacg | | | |
| | acgtgctgctggagctgggacccagcattgaggagg | | | |
| | attgccaaaagtatatcttgaagcagcagcaggagga | | | |
| | ggctgagaagcctttacaggtggccgctgtagacagc | | | |
| | agtgtcccacggacagcagagctggcgggcatcacc | | | |
| | acacttgatgaccccctggggcatatgcctgagcgtttc | | | |
| | gatgccttcatctgctattgccccagcgacatc | | | |
| Linker | gtcgag | 2100 | VE | 2101 |
| CD40 | aaaaaggtggccaagaagccaaccaataaggcccc | 2102 | KKVAKKPTNKAPHPKQEPQEINFPDDL | 2103 |
| | ccaccccaagcaggagccccaggagatcaattttccc | | PGSNTAAPVQETLHGCQPVTQEDGKE | |
| | gacgatcttcctggctccaacactgctgctccagtgcag | | SRISVQERQ | |
| | gagactttacatggatgccaaccggtcacccaggagg | | | |
| | atggcaaagagagtcgcatctcagtgcaggagagac | | | |
| | ag | | | |
| Linker | gcggCCGCaggtagcggg | 2104 | aaaGSG | 2105 |
| P2A | GCAACGAATTTTTCCCTGCTGAAACA | 2106 | ATNFSLLKQAGDVEENPGP | 2107 |
| | GGCAGGGGACGTAGAGGAAAATCCT | | | |
| | GGTCCT | | | |
| Linker | gtcgag | 2108 | VE | 2109 |
| FKBP_{WT}′ | GGCGTCCAAGTCGAAACCATTAGTCC | 2110 | GVQVETISPGDGRTFPKRGQTCVVHYT | 2111 |
| | CGGCGATGGCAGAACATTTCCTACAA | | GMLEDGKKFDSSRDRNKPFKFMLGKQ | |
| | GGGGACAAACATGTGTCGTCCATTAT | | EVIRGWEEGVAQMSVGQRAKLTISPDY | |
| | ACAGGCATGTTGGAGGACGGCAAAAA | | AYGATGHPGIIPPHATLVFDVELLKLE | |
| | GTTCGACAGTAGTAGAGATCGCAATA | | | |
| | AACCTTTCAAATTCATGTTGGGAAAAC | | | |
| | AAGAAGTCATTAGGGGATGGGAGGA | | | |
| | GGGCGTGGCTCAAATGTCCGTCGGC | | | |
| | CAACGCGCTAAGCTCACCATCAGCCC | | | |
| | CGACTACGCATACGGCGCTACCGGA | | | |
| | CATCCCGGAATTATTCCCCCTCACGC | | | |
| | TACCTTGGTGTTTGACGTCGAACTGTT | | | |
| | GAAGCTCGAA | | | |
| Linker | gtcgag | 2112 | VE | 2113 |
| FRB_{L} | CAATTGGAAATGTGGCATGAAGGGTT | 2114 | QLEMWHEGLEEASRLYFGERNVKGMF | 2115 |
| | GGAAGAAGCTTCAAGGCTGTACTTCG | | EVLEPLHAMMERGPQTLKETSFNQAYG | |
| | GAGAGAGGAACGTGAAGGGCATGTTT | | RDLMEAQEWCRKYMKSGNVKDLLQA | |
| | GAGGTTCTTGAACCTCTGCACGCCAT | | WDLYYHVFRRISK | |
| | GATGGAACGGGGACCGCAGACACTG | | | |
| | AAAGAAACCTCTTTTAATCAGGCCTAC | | | |
| | GGCAGAGACCTGATGGAGGCCCAAG | | | |
| | AATGGTGTAGAAAGTATATGAAATCC | | | |
| | GGTAACGTGAAAGACCTGCTCCAGGC | | | |
| | CTGGGACCTTTATTACCATGTGTTCAG | | | |
| | GCGGATCAGTAAG | | | |
| Linker | ggatctggaccgcgg | 2118 | GSGpr | 2119 |
| T2A | GAAGGCCGAGGGAGCCTGCTGACAT | 2120 | EGRGSLLTCGDVEENPGP | 2121 |
| | GTGGCGATGTGGAGGAAAACCCAGG | | | |
| | ACCA | | | |
| Linker | GCATGCGCCACC | 2122 | ACAT | 2123 |
| Signal Peptide | ATGGAGTTTGGGTTGTCATGGTTGTTT | 2124 | MEFGLSWLFLVAILKGVQCSR | 2125 |
| | CTCGTCGCTATTCTCAAAGGTGTACA | | | |
| | ATGCTCCCGC | | | |
| HER2(FRP5) VH | GAAGTCCAATTGCAACAGTCAGGCCC | 2126 | EVQLQQSGPELKKPGETVKISCKASGY | 2127 |
| | CGAATTGAAAAAGCCCGGCGAAACAG | | PFTNYGMNWVKQAPGQGLKWMGWIN | |
| | TGAAGATATCTTGTAAAGCCTCCGGTT | | TSTGESTFADDFKGRFDFSLETSANTA | |
| | ACCCTTTTACGAACTATGGAATGAACT | | YLQINNLKSEDMATYFCARWEVYHGYV | |
| | GGGTCAAACAAGCCCCTGGACAGGG | | PYWGQGTTVTVSS | |
| | ATTGAAGTGGATGGGATGGATCAATA | | | |
| | CATCAACAGGCGAGTCTACCTTCGCA | | | |
| | GATGATTTCAAAGGTCGCTTTGACTTC | | | |
| | TCACTGGAGACCAGTGCAAATACCGC | | | |
| | CTACCTTCAGATTAACAATCTTAAAAG | | | |
| | CGAGGATATGGCAACCTACTTTTGCG | | | |
| | CAAGATGGGAAGTTTATCACGGGTAC | | | |
| | GTGCCATACTGGGGACAAGGAACGA | | | |
| | CAGTGACAGTTAGTAGC | | | |
| Flex | GGCGGTGGAGGCTCCGGTGGAGGCG | 2128 | GGGGSGGGGSGGGGS | 2129 |
| | GCTCTGGAGGAGGAGGTTCA | | | |
| HER2(FRP5) VL | GACATCCAATTGACACAATCACACAAA | 2130 | EVQLVEYGGGLVQPGGSLRLSCAASG | 2131 |
| | TTTCTCTCAACTTCTGTAGGAGACAGA | | FNIKDYYIHWVRQAPGKGLEWVAWIDP | |
| | GTGAGCATAACCTGCAAAGCATCCCA | | ENGDTEFVPKFQGRATMSADTSKNTAY | |
| | GGACGTGTACAATGCTGTGGCTTGGT | | LQMNSLRAEDTAVYYCKTGGFWGQGT | |
| | ACCAACAGAAGCCTGGACAATCCCCA | | LVTVSS | |
| | AAATTGCTGATTTATTCTGCCTCTAGT | | | |
| | AGGTACACTGGGGTACCTTCTCGGTT | | | |
| | TACGGGCTCTGGGTCCGGACCAGATT | | | |
| | TCACGTTCACAATCAGTTCCGTTCAAG | | | |
| | CTGAAGACCTCGCTGTTTATTTTTGCC | | | |
| | AGCAGCACTTCCGAACCCCTTTTACTT | | | |
| | TTGGCTCAGGCACTAAGTTGGAAATC | | | |
| | AAGGCTTTG | | | |
| Linker | atgcat | 2132 | MH | 2133 |
| CD34 epitope | GAACTTCCTACTCAGGGGACTTTCTC | 2134 | ELPTQGTFSNVSTNVS | 2135 |
| | AAACGTTAGCACAAACGTAAGT | | | |
| CD3ζ | AGAGTGAAGTTCAGCAGGAGCGCAG | 2136 | RVKFSRSADAPAYQQGQNQLYNELNL | 2137 |
| | ACGCCCCCGCGTACCAGCAGGGCCA | | GRREEYDVLDKRRGRDPEMGGKPRRK | |
| | GAACCAGCTCTATAACGAGCTCAATC | | NPQEGLYNELQKDKMAEAYSEIGMKGE | |
| | TAGGACGAAGAGAGGAGTACGATGTT | | RRRGKGHDGLYQGLSTATKDTYDALH | |
| | TTGGACAAGAGACGTGGCCGGGACC | | MQALPPR | |
| | CTGAGATGGGGGGAAAGCCGAGAAG | | | |
| | GAAGAACCCTCAGGAAGGCCTGTACA | | | |
| | ATGAACTGCAGAAAGATAAGATGGCG | | | |
| | GAGGCCTACAGTGAGATTGGGATGAA | | | |
| | AGGCGAGCGCCGGAGGGGCAAGGG | | | |
| | GCACGATGGCCTTTACCAGGGTCTCA | | | |
| | GTACAGCCACCAAGGACACCTACGAC | | | |
| | GCCCTTCACATGCAAGCTCTTCCACC | | | |
| | TCGT | | | |

APPENDIX 31
pBP1493—pSFG-MC.FKBP_{wt}.FRB_{L}-P2A.FKBPv.ΔC9.T2A-αHER2.Q.CD8stm.ζ

| | | SEQ ID | | |
|---|---|---|---|---|
| Fragment | Nucleotide | NO: | Peptide | SEQ ID NO: |
| MyD88 | atggctgcaggaggtcccggcgcggggtctgcggcc | 2138 | MAAGGPGAGSAAPVSSTSSLPLAALN | 2139 |
| | ccggtctcctccacatcctcccttcccctggctgctctca | | MRVRRRLSLFLNVRTQVAADWTALAEE | |
| | acatgcgagtgcggcgccgcctgtctctgttcttgaacg | | MDFEYLEIRQLETQADPTGRLLDAWQG | |
| | tgcggacacaggtggcggccgactggaccgcgctgg | | RPGASVGRLLDLLTKLGRDDVLLELGP | |
| | cggaggagatggactttgagtacttggagatccggca | | SIEEDCQKYILKQQQEEAEKPLQVAAVD | |
| | actggagacacaagcggaccccactggcaggctgct | | SSVPRTAELAGITTLDDPLGHMPERFDA | |
| | ggacgcctggcagggacgccctggcgcctctgtagg | | FICYCPSDI | |
| | ccgactgctcgatctgcttaccaagctgggccgcgacg | | | |
| | acgtgctgctggagctgggacccagcattgaggagg | | | |
| | attgccaaaagtatatcttgaagcagcagcaggagga | | | |
| | ggctgagaagcctttacaggtggccgctgtagacagc | | | |
| | agtgtcccacggacagcagagctggcgggcatcacc | | | |
| | acacttgatgaccccctggggcatatgcctgagcgtttc | | | |
| | gatgccttcatctgctattgccccagcgacatc | | | |
| Linker | gtcgag | 2140 | VE | 2141 |
| CD40 | aaaaaggtggccaagaagccaaccaataaggcccc | 2142 | KKVAKKPTNKAPHPKQEPQEINFPDDL | 2143 |
| | ccaccccaagcaggagccccaggagatcaattttccc | | PGSNTAAPVQETLHGCQPVTQEDGKE | |
| | gacgatcttcctggctccaacactgctgctccagtgcag | | SRISVQERQ | |
| | gagactttacatggatgccaaccggtcacccaggagg | | | |
| | atggcaaagagagtcgcatctcagtgcaggagagac | | | |
| | ag | | | |
| Linker | gtcgag | 2144 | VE | 2145 |
| FKBP_{WT}′ | GGCGTCCAAGTCGAAACCATTAGTCC | 2146 | GVQVETISPGDGRTFPKRGQTCVVHYT | 2147 |
| | CGGCGATGGCAGAACATTTCCTACAA | | GMLEDGKKFDSSRDRNKPFKFMLGKQ | |
| | GGGGACAAACATGTGTCGTCCATTAT | | EVIRGWEEGVAQMSVGQRAKLTISPDY | |
| | ACAGGCATGTTGGAGGACGGCAAAAA | | AYGATGHPGIIPPHATLVFDVELLKLE | |
| | GTTCGACAGTAGTAGAGATCGCAATA | | | |
| | AACCTTTCAAATTCATGTTGGGAAAAC | | | |
| | AAGAAGTCATTAGGGGATGGGAGGA | | | |
| | GGGCGTGGCTCAAATGTCCGTCGGC | | | |
| | CAACGCGCTAAGCTCACCATCAGCCC | | | |
| | CGACTACGCATACGGCGCTACCGGA | | | |
| | CATCCCGGAATTATTCCCCCTCACGC | | | |
| | TACCTTGGTGTTTGACGTCGAACTGTT | | | |
| | GAAGCTCGAA | | | |
| Linker | gtcgag | 2148 | VE | 2149 |
| FRB_{L} | CAATTGGAAATGTGGCATGAAGGGTT | 2150 | QLEMWHEGLEEASRLYFGERNVKGMF | 2151 |
| | GGAAGAAGCTTCAAGGCTGTACTTCG | | EVLEPLHAMMERGPQTLKETSFNQAYG | |
| | GAGAGAGGAACGTGAAGGGCATGTTT | | RDLMEAQEWCRKYMKSGNVKDLLQA | |
| | GAGGTTCTTGAACCTCTGCACGCCAT | | WDLYYHVFRRISK | |
| | GATGGAACGGGGACCGCAGACACTG | | | |
| | AAAGAAACCTCTTTTAATCAGGCCTAC | | | |
| | GGCAGAGACCTGATGGAGGCCCAAG | | | |
| | AATGGTGTAGAAAGTATATGAAATCC | | | |
| | GGTAACGTGAAAGACCTGCTCCAGGC | | | |
| | CTGGGACCTTTATTACCATGTGTTCAG | | | |
| | GCGGATCAGTAAG | | | |
| Linker | gcggCCGCaggtagcggg | 2152 | aaaGSG | 2153 |
| P2A | GCAACGAATTTTTCCCTGCTGAAACA | 2154 | ATNFSLLKQAGDVEENPGP | 2155 |
| | GGCAGGGGACGTAGAGGAAAATCCT | | | |
| | GGTCCT | | | |
| Linker | ggatctgga | 2156 | GSG | 2157 |
| FKBPv | GGAGTGCAGGTGGAGACTATTAGCCC | 2158 | GVQVETISPGDGRTFPKRGQTCVVHYT | 2159 |
| | CGGAGATGGCAGAACATTCCCCAAAA | | GMLEDGKKVDSSRDRNKPFKFMLGKQ | |
| | GAGGACAGACTTGCGTCGTGCATTAT | | EVIRGWEEGVAQMSVGQRAKLTISPDY | |
| | ACTGGAATGCTGGAAGACGGCAAGAA | | AYGATGHPGIIPPHATLVFDVELLKLE | |
| | GGTGGACAGCAGCCGGGACCGAAAC | | | |
| | AAGCCCTTCAAGTTCATGCTGGGGAA | | | |
| | GCAGGAAGTGATCCGGGGCTGGGAG | | | |
| | GAAGGAGTCGCACAGATGTCAGTGG | | | |
| | GACAGAGGGCCAAACTGACTATTAGC | | | |
| | CCAGACTACGCTTATGGAGCAACCGG | | | |
| | CCACCCCGGGATCATTCCCCCTCATG | | | |
| | CTACACTGGTCTTCGATGTGGAGCTG | | | |
| | CTGAAGCTGGAA | | | |
| Linker | TCAGGCGGTGGCTCAGGTGTGGAC | 2160 | SGGGSGVD | 2161 |
| Δcaspase9 | GGATTTGGTGATGTCGGTGCTCTTGA | 2162 | GFGDVGALESLRGNADLAYILSMEPCG | 2163 |
| | GAGTTTGAGGGGAAATGCAGATTTGG | | HCLIINNVNFCRESGLRTRTGSNIDCEK | |
| | CTTACATCCTGAGCATGGAGCCCTGT | | LRRRFSSLHFMVEVKGDLTAKKMVLAL | |
| | GGCCACTGCCTCATTATCAACAATGT | | LELARQDHGALDCCVVVILSHGCQASH | |
| | GAACTTCTGCCGTGAGTCCGGGCTCC | | LQFPGAVYGTDGCPVSVEKIVNIFNGTS | |
| | GCACCCGCACTGGCTCCAACATCGAC | | CPSLGGKPKLFFIQACGGEQKDHGFEV | |
| | TGTGAGAAGTTGCGGCGTCGCTTCTC | | ASTSPEDESPGSNPEPDATPFQEGLRT | |
| | CTCGCTGCATTTCATGGTGGAGGTGA | | FDQLDAISSLPTPSDIFVSYSTFPGFVS | |
| | AGGGCGACCTGACTGCCAAGAAAATG | | WRDPKSGSWYVETLDDIFEQWAHSED | |
| | GTGCTGGCTTTGCTGGAGCTGGCGCg | | LQSLLLRVANAVSVKGIYKQMPGCFNF | |
| | GCAGGACCACGGTGCTCTGGACTGC | | LRKKLFFKTSASRA | |
| | TGCGTGGTGGTCATTCTCTCTCACGG | | | |
| | CTGTCAGGCCAGCCACCTGCAGTTCC | | | |
| | CAGGGGCTGTCTACGGCACAGATGG | | | |
| | ATGCCCTGTGTCGGTCGAGAAGATTG | | | |
| | TGAACATCTTCAATGGGACCAGCTGC | | | |
| | CCCAGCCTGGGAGGGAAGCCCAAGC | | | |
| | TCTTTTTCATCCAGGCCTGTGGTGGG | | | |
| | GAGCAGAAAGAtCATGGGTTTGAGGT | | | |
| | GGCCTCCACTTCCCCTGAAGACGAGT | | | |
| | CCCCTGGCAGTAACCCCGAGCCAGAT | | | |
| | GCCACCCCGTTCCAGGAAGGTTTGAG | | | |
| | GACCTTCGACCAGCTGGACGCCATAT | | | |
| | CTAGTTTGCCCACACCCAGTGACATC | | | |
| | TTTGTGTCCTACTCTACTTTCCCAGGT | | | |
| | TTTGTTTCCTGGAGGGACCCCAAGAG | | | |
| | TGGCTCCTGGTACGTTGAGACCCTGG | | | |
| | ACGACATCTTTGAGCAGTGGGCTCAC | | | |
| | TCTGAAGACCTGCAGTCCCTCCTGCT | | | |
| | TAGGGTCGCTAATGCTGTTTCGGTGA | | | |
| | AAGGGATTTATAAACAGATGCCTGGT | | | |
| | TGCTTTAATTTCCTCCGGAAAAAACTT | | | |
| | TTCTTTAAAACATCAGCTAGCAGAGCC | | | |
| Linker | ggatctggaccgcGG | 2164 | GSGPR | 2165 |
| T2A | GAAGGCCGAGGGAGCCTGCTGACAT | 2166 | EGRGSLLTCGDVEENPGP | 2167 |
| | GTGGCGATGTGGAGGAAAACCCAGG | | | |
| | ACCA | | | |
| Linker | GCATGCGCCACC | 2168 | ACAT | 2169 |
| Signal Peptide | ATGGAGTTTGGGTTGTCATGGTTGTTT | 2170 | MEFGLSWLFLVAILKGVQCSR | 2171 |
| | CTCGTCGCTATTCTCAAAGGTGTACA | | | |
| | ATGCTCCCGC | | | |
| HER2(FRP5) VH | GAAGTCCAATTGCAACAGTCAGGCCC | 2172 | EVQLQQSGPELKKPGETVKISCKASGY | 2173 |
| | CGAATTGAAAAAGCCCGGCGAAACAG | | PFTNYGMNWVKQAPGQGLKWMGWIN | |
| | TGAAGATATCTTGTAAAGCCTCCGGTT | | TSTGESTFADDFKGRFDFSLETSANTA | |
| | ACCCTTTTACGAACTATGGAATGAACT | | YLQINNLKSEDMATYFCARWEVYHGYV | |
| | GGGTCAAACAAGCCCCTGGACAGGG | | PYWGQGTTVTVSS | |
| | ATTGAAGTGGATGGGATGGATCAATA | | | |
| | CATCAACAGGCGAGTCTACCTTCGCA | | | |
| | GATGATTTCAAAGGTCGCTTTGACTTC | | | |
| | TCACTGGAGACCAGTGCAAATACCGC | | | |
| | CTACCTTCAGATTAACAATCTTAAAAG | | | |
| | CGAGGATATGGCAACCTACTTTTGCG | | | |
| | CAAGATGGGAAGTTTATCACGGGTAC | | | |
| | GTGCCATACTGGGGACAAGGAACGA | | | |
| | CAGTGACAGTTAGTAGC | | | |
| Flex | GGCGGTGGAGGCTCCGGTGGAGGCG | 2174 | GGGGSGGGGSGGGGS | 2175 |
| | GCTCTGGAGGAGGAGGTTCA | | | |
| HER2(FRP5) VL | GACATCCAATTGACACAATCACACAAA | 2176 | EVQLVEYGGGLVQPGGSLRLSCAASG | 2177 |
| | TTTCTCTCAACTTCTGTAGGAGACAGA | | FNIKDYYIHWVRQAPGKGLEWVAWIDP | |
| | GTGAGCATAACCTGCAAAGCATCCCA | | ENGDTEFVPKFQGRATMSADTSKNTAY | |
| | GGACGTGTACAATGCTGTGGCTTGGT | | LQMNSLRAEDTAVYYCKTGGFWGQGT | |
| | ACCAACAGAAGCCTGGACAATCCCCA | | LVTVSS | |
| | AAATTGCTGATTTATTCTGCCTCTAGT | | | |
| | AGGTACACTGGGGTACCTTCTCGGTT | | | |
| | TACGGGCTCTGGGTCCGGACCAGATT | | | |
| | TCACGTTCACAATCAGTTCCGTTCAAG | | | |
| | CTGAAGACCTCGCTGTTTATTTTTGCC | | | |
| | AGCAGCACTTCCGAACCCCTTTTACTT | | | |
| | TTGGCTCAGGCACTAAGTTGGAAATC | | | |
| | AAGGCTTTG | | | |
| Linker | atgcat | 2178 | MH | 2179 |
| CD34 epitope | GAACTTCCTACTCAGGGGACTTTCTC | 2180 | ELPTQGTFSNVSTNVS | 2181 |
| | AAACGTTAGCACAAACGTAAGT | | | |
| CD3ζ | AGAGTGAAGTTCAGCAGGAGCGCAG | 2182 | RVKFSRSADAPAYQQGQNQLYNELNL | 2183 |
| | ACGCCCCCGCGTACCAGCAGGGCCA | | GRREEYDVLDKRRGRDPEMGGKPRRK | |
| | GAACCAGCTCTATAACGAGCTCAATC | | NPQEGLYNELQKDKMAEAYSEIGMKGE | |
| | TAGGACGAAGAGAGGAGTACGATGTT | | RRRGKGHDGLYQGLSTATKDTYDALH | |
| | TTGGACAAGAGACGTGGCCGGGACC | | MQALPPR | |
| | CTGAGATGGGGGGAAAGCCGAGAAG | | | |
| | GAAGAACCCTCAGGAAGGCCTGTACA | | | |
| | ATGAACTGCAGAAAGATAAGATGGCG | | | |
| | GAGGCCTACAGTGAGATTGGGATGAA | | | |
| | AGGCGAGCGCCGGAGGGGCAAGGG | | | |
| | GCACGATGGCCTTTACCAGGGTCTCA | | | |
| | GTACAGCCACCAAGGACACCTACGAC | | | |
| | GCCCTTCACATGCAAGCTCTTCCACC | | | |
| | TCGT | | | |

APPENDIX 32
pBP1494—pSFG-MC.FKBP_{wt}.FRB_{L}-P2A.FKBPv.ΔC9.T2A-PSCA.Q.CD8stm.ζ

| | | SEQ ID | | |
|---|---|---|---|---|
| Fragment | Nucleotide | NO: | Peptide | SEQ ID NO: |
| MyD88 | atggctgcaggaggtcccggcgaggggtctgcggcc | 2184 | MAAGGPGAGSAAPVSSTSSLPLAALN | 2185 |
| | ccggtctcctccacatcctcccttcccctggctgctctca | | MRVRRRLSLFLNVRTQVAADWTALAEE | |
| | acatgcgagtgcggcgccgcctgtctctgttcttgaacg | | MDFEYLEIRQLETQADPTGRLLDAWQG | |
| | tgcggacacaggtggcggccgactggaccgcgctgg | | RPGASVGRLLDLLTKLGRDDVLLELGP | |
| | cggaggagatggactttgagtacttggagatccggca | | SIEEDCQKYILKQQQEEAEKPLQVAAVD | |
| | actggagacacaagaggaccccactggcaggctgct | | SSVPRTAELAGITTLDDPLGHMPERFDA | |
| | ggacgcctggcagggacgccctggcgcctctgtagg | | FICYCPSDI | |
| | ccgactgctcgatctgcttaccaagctgggccgcgacg | | | |
| | acgtgctgctggagctgggacccagcattgaggagg | | | |
| | attgccaaaagtatatcttgaagcagcagcaggagga | | | |
| | ggctgagaagcctttacaggtggccgctgtagacagc | | | |
| | agtgtcccacggacagcagagctggcgggcatcacc | | | |
| | acacttgatgaccccctggggcatatgcctgagcgtttc | | | |
| | gatgccttcatctgctattgccccagcgacatc | | | |
| Linker | gtcgag | 2186 | VE | 2187 |
| CD40 | aaaaaggtggccaagaagccaaccaataaggcccc | 2188 | KKVAKKPTNKAPHPKQEPQEINFPDDL | 2189 |
| | ccaccccaagcaggagccccaggagatcaattttccc | | PGSNTAAPVQETLHGCQPVTQEDGKE | |
| | gacgatcttcctggctccaacactgctgctccagtgcag | | SRISVQERQ | |
| | gagactttacatggatgccaaccggtcacccaggagg | | | |
| | atggcaaagagagtcgcatctcagtgcaggagagac | | | |
| | ag | | | |
| Linker | gtcgag | 2190 | VE | 2191 |
| FKBP_{WT}′ | GGCGTCCAAGTCGAAACCATTAGTCC | 2192 | GVQVETISPGDGRTFPKRGQTCVVHYT | 2193 |
| | CGGCGATGGCAGAACATTTCCTACAA | | GMLEDGKKFDSSRDRNKPFKFMLGKQ | |
| | GGGGACAAACATGTGTCGTCCATTAT | | EVIRGWEEGVAQMSVGQRAKLTISPDY | |
| | ACAGGCATGTTGGAGGACGGCAAAAA | | AYGATGHPGIIPPHATLVFDVELLKLE | |
| | GTTCGACAGTAGTAGAGATCGCAATA | | | |
| | AACCTTTCAAATTCATGTTGGGAAAAC | | | |
| | AAGAAGTCATTAGGGGATGGGAGGA | | | |
| | GGGCGTGGCTCAAATGTCCGTCGGC | | | |
| | CAACGCGCTAAGCTCACCATCAGCCC | | | |
| | CGACTACGCATACGGCGCTACCGGA | | | |
| | CATCCCGGAATTATTCCCCCTCACGC | | | |
| | TACCTTGGTGTTTGACGTCGAACTGTT | | | |
| | GAAGCTCGAA | | | |
| Linker | gtcgag | 2194 | VE | 2195 |
| FRB_{L} | CAATTGGAAATGTGGCATGAAGGGTT | 2196 | QLEMWHEGLEEASRLYFGERNVKGMF | 2197 |
| | GGAAGAAGCTTCAAGGCTGTACTTCG | | EVLEPLHAMMERGPQTLKETSFNQAYG | |
| | GAGAGAGGAACGTGAAGGGCATGTTT | | RDLMEAQEWCRKYMKSGNVKDLLQA | |
| | GAGGTTCTTGAACCTCTGCACGCCAT | | WDLYYHVFRRISK | |
| | GATGGAACGGGGACCGCAGACACTG | | | |
| | AAAGAAACCTCTTTTAATCAGGCCTAC | | | |
| | GGCAGAGACCTGATGGAGGCCCAAG | | | |
| | AATGGTGTAGAAAGTATATGAAATCC | | | |
| | GGTAACGTGAAAGACCTGCTCCAGGC | | | |
| | CTGGGACCTTTATTACCATGTGTTCAG | | | |
| | GCGGATCAGTAAG | | | |
| Linker | gcggCCGCaggtagcggg | 2198 | aaaGSG | 2199 |
| P2A | GCAACGAATTTTTCCCTGCTGAAACA | 2200 | ATNFSLLKQAGDVEENPGP | 2201 |
| | GGCAGGGGACGTAGAGGAAAATCCT | | | |
| | GGTCCT | | | |
| Linker | atgcatATGCTGGAG | 2202 | MHMLE | 2203 |
| FKBPv | GGAGTGCAGGTGGAGACTATTAGCCC | 2204 | GVQVETISPGDGRTFPKRGQTCVVHYT | 2205 |
| | CGGAGATGGCAGAACATTCCCCAAAA | | GMLEDGKKVDSSRDRNKPFKFMLGKQ | |
| | GAGGACAGACTTGCGTCGTGCATTAT | | EVIRGWEEGVAQMSVGQRAKLTISPDY | |
| | ACTGGAATGCTGGAAGACGGCAAGAA | | AYGATGHPGIIPPHATLVFDVELLKLE | |
| | GGTGGACAGCAGCCGGGACCGAAAC | | | |
| | AAGCCCTTCAAGTTCATGCTGGGGAA | | | |
| | GCAGGAAGTGATCCGGGGCTGGGAG | | | |
| | GAAGGAGTCGCACAGATGTCAGTGG | | | |
| | GACAGAGGGCCAAACTGACTATTAGC | | | |
| | CCAGACTACGCTTATGGAGCAACCGG | | | |
| | CCACCCCGGGATCATTCCCCCTCATG | | | |
| | CTACACTGGTCTTCGATGTGGAGCTG | | | |
| | CTGAAGCTGGAA | | | |
| Linker | TCAGGCGGTGGCTCAGGTGTGGAC | 2206 | SGGGSGVD | 2207 |
| Δcaspase9 | GGATTTGGTGATGTCGGTGCTCTTGA | 2208 | GFGDVGALESLRGNADLAYILSMEPCG | 2209 |
| | GAGTTTGAGGGGAAATGCAGATTTGG | | HCLIINNVNFCRESGLRTRTGSNIDCEK | |
| | CTTACATCCTGAGCATGGAGCCCTGT | | LRRRFSSLHFMVEVKGDLTAKKMVLAL | |
| | GGCCACTGCCTCATTATCAACAATGT | | LELARQDHGALDCCVVVILSHGCQASH | |
| | GAACTTCTGCCGTGAGTCCGGGCTCC | | LQFPGAVYGTDGCPVSVEKIVNIFNGTS | |
| | GCACCCGCACTGGCTCCAACATCGAC | | CPSLGGKPKLFFIQACGGEQKDHGFEV | |
| | TGTGAGAAGTTGCGGCGTCGCTTCTC | | ASTSPEDESPGSNPEPDATPFQEGLRT | |
| | CTCGCTGCATTTCATGGTGGAGGTGA | | WRDPKSGSWYVETLDDIFEQWAHSED | |
| | AGGGCGACCTGACTGCCAAGAAAATG | | LQSLLLRVANAVSVKGIYKQMPGCFNF | |
| | GTGCTGGCTTTGCTGGAGCTGGCGCg | | LRKKLFFKTSASRA | |
| | GCAGGACCACGGTGCTCTGGACTGC | | | |
| | TGCGTGGTGGTCATTCTCTCTCACGG | | | |
| | CTGTCAGGCCAGCCACCTGCAGTTCC | | | |
| | CAGGGGCTGTCTACGGCACAGATGG | | | |
| | ATGCCCTGTGTCGGTCGAGAAGATTG | | | |
| | TGAACATCTTCAATGGGACCAGCTGC | | | |
| | CCCAGCCTGGGAGGGAAGCCCAAGC | | | |
| | TCTTTTTCATCCAGGCCTGTGGTGGG | | | |
| | GAGCAGAAAGAtCATGGGTTTGAGGT | | | |
| | GGCCTCCACTTCCCCTGAAGACGAGT | | | |
| | CCCCTGGCAGTAACCCCGAGCCAGAT | | | |
| | GCCACCCCGTTCCAGGAAGGTTTGAG | | | |
| | GACCTTCGACCAGCTGGACGCCATAT | | | |
| | CTAGTTTGCCCACACCCAGTGACATC | | | |
| | TTTGTGTCCTACTCTACTTTCCCAGGT | | | |
| | TTTGTTTCCTGGAGGGACCCCAAGAG | | | |
| | TGGCTCCTGGTACGTTGAGACCCTGG | | | |
| | ACGACATCTTTGAGCAGTGGGCTCAC | | | |
| | TCTGAAGACCTGCAGTCCCTCCTGCT | | | |
| | TAGGGTCGCTAATGCTGTTTCGGTGA | | | |
| | AAGGGATTTATAAACAGATGCCTGGT | | | |
| | TGCTTTAATTTCCTCCGGAAAAAACTT | | | |
| | TTCTTTAAAACATCAGCTAGCAGAGCC | | | |
| Linker | ggatctggaccgcGG | 2210 | GSGPR | 2211 |
| T2A | GAAGGCCGAGGGAGCCTGCTGACAT | 2212 | EGRGSLLTCGDVEENPGP | 2213 |
| | GTGGCGATGTGGAGGAAAACCCAGG | | | |
| | ACCA | | | |
| Linker | CCACGG | 2214 | PR | 2215 |
| Signal Peptide | ATGGAGTTTGGACTTTCTTGGTTGTTT | 2216 | MEFGLSWLFLVAILKGVQCSR | 2217 |
| | TTGGTGGCAATTCTGAAGGGTGTCCA | | | |
| | GTGTAGCAGG | | | |
| PSCA(A11) VL | GACATCCAACTGACGCAAAGCCCATC | 2218 | DIQLTQSPSTLSASMGDRVTITCSASSS | 2219 |
| | TACACTCAGCGCTAGCATGGGGGACA | | VRFIHWYQQKPGKAPKRLIYDTSKLAS | |
| | GGGTCACAATCACGTGCTCTGCCTCA | | GVPSRFSGSGSGTDFTLTISSLQPEDFA | |
| | AGTTCCGTTAGGTTTATCCATTGGTAT | | TYYCQQWGSSPFTFGQGTKVEIK | |
| | CAGCAGAAACCTGGAAAGGCCCCAAA | | | |
| | AAGACTGATCTATGATACCAGCAAGC | | | |
| | TGGCTTCCGGAGTGCCCTCAAGGTTC | | | |
| | TCAGGATCTGGCAGTGGGACCGATTT | | | |
| | CACCCTGACAATTAGCAGCCTTCAGC | | | |
| | CAGAGGATTTCGCAACCTATTACTGT | | | |
| | CAGCAATGGGGGTCCAGCCCATTCAC | | | |
| | TTTCGGCCAAGGAACAAAGGTGGAGA | | | |
| | TAAAA | | | |
| Flex | GGCGGAGGAAGCGGAGGTGGGGGC | 2220 | gggsgggg | 2221 |
| PSCA(A11) VH | GAGGTGCAGCTCGTGGAGTATGGCG | 2222 | EVQLVEYGGGLVQPGGSLRLSCAASG | 2223 |
| | GGGGCCTGGTGCAGCCTGGGGGTAG | | FNIKDYYIHWVRQAPGKGLEWVAWIDP | |
| | TCTGAGGCTCTCCTGCGCTGCCTCTG | | ENGDTEFVPKFQGRATMSADTSKNTAY | |
| | GCTTTAACATTAAAGACTACTACATAC | | LQMNSLRAEDTAVYYCKTGGFWGQGT | |
| | ATTGGGTGCGGCAGGCCCCAGGCAA | | LVTVSS | |
| | AGGGCTCGAATGGGTGGCCTGGATT | | | |
| | GACCCTGAGAATGGTGACACTGAGTT | | | |
| | TGTCCCCAAGTTTCAGGGCAGAGCCA | | | |
| | CCATGAGCGCTGACACAAGCAAAAAC | | | |
| | ACTGCTTATCTCCAAATGAATAGCCTG | | | |
| | CGAGCTGAAGATACAGCAGTCTATTA | | | |
| | CTGCAAGACGGGAGGATTCTGGGGC | | | |
| | CAGGGAACTCTGGTGACAGTTAGTTCC | | | |
| Linker | GGATCC | 2224 | gs | 2225 |
| CD34 epitope | GAACTTCCTACTCAGGGGACTTTCTC | 2226 | ELPTQGTFSNVSTNVS | 2227 |
| | AAACGTTAGCACAAACGTAAGT | | | |
| CD3ζ | AGAGTGAAGTTCAGCAGGAGCGCAG | 2228 | RVKFSRSADAPAYQQGQNQLYNELNL | 2229 |
| | ACGCCCCCGCGTACCAGCAGGGCCA | | GRREEYDVLDKRRGRDPEMGGKPRRK | |
| | GAACCAGCTCTATAACGAGCTCAATC | | NPQEGLYNELQKDKMAEAYSEIGMKGE | |
| | TAGGACGAAGAGAGGAGTACGATGTT | | RRRGKGHDGLYQGLSTATKDTYDALH | |
| | TTGGACAAGAGACGTGGCCGGGACC | | MQALPPR | |
| | CTGAGATGGGGGGAAAGCCGAGAAG | | | |
| | GAAGAACCCTCAGGAAGGCCTGTACA | | | |
| | ATGAACTGCAGAAAGATAAGATGGCG | | | |
| | GAGGCCTACAGTGAGATTGGGATGAA | | | |
| | AGGCGAGCGCCGGAGGGGCAAGGG | | | |
| | GCACGATGGCCTTTACCAGGGTCTCA | | | |
| | GTACAGCCACCAAGGACACCTACGAC | | | |
| | GCCCTTCACATGCAAGCTCTTCCACC | | | |
| | TCGT | | | |

APPENDIX 33
pBP1757—pSFG-FRB_{L}.FKBP_{wt}.MC-P2A.FKBPv.ΔC9.T2A-αPSCA.Q.CD8stm.ζ

| | | SEQ ID | | |
|---|---|---|---|---|
| Fragment | Nucleotide | NO: | Peptide | SEQ ID NO: |
| FRB_{L} | ATGTTGGAAATGTGGCATGAAGGGTT | 2230 | MLEMWHEGLEEASRLYFGERNVKGMF | 2231 |
| | GGAAGAAGCTTCAAGGCTGTACTTCG | | EVLEPLHAMMERGPQTLKETSFNQAYG | |
| | GAGAGAGGAACGTGAAGGGCATGTTT | | RDLMEAQEWCRKYMKSGNVKDLLQA | |
| | GAGGTTCTTGAACCTCTGCACGCCAT | | WDLYYHVFRRISK | |
| | GATGGAACGGGGACCGCAGACACTG | | | |
| | AAAGAAACCTCTTTTAATCAGGCCTAC | | | |
| | GGCAGAGACCTGATGGAGGCCCAAG | | | |
| | AATGGTGTAGAAAGTATATGAAATCC | | | |
| | GGTAACGTGAAAGACCTGCTCCAGGC | | | |
| | CTGGGACCTTTATTACCATGTGTTCAG | | | |
| | GCGGATCAGTAAG | | | |
| Linker | gtcgag | 2232 | VE | 2233 |
| FKBP_{WT}′ | GGCGTCCAAGTCGAAACCATTAGTCC | 2234 | GVQVETISPGDGRTFPKRGQTCVVHYT | 2235 |
| | CGGCGATGGCAGAACATTTCCTACAA | | GMLEDGKKFDSSRDRNKPFKFMLGKQ | |
| | GGGGACAAACATGTGTCGTCCATTAT | | EVIRGWEEGVAQMSVGQRAKLTISPDY | |
| | ACAGGCATGTTGGAGGACGGCAAAAA | | AYGATGHPGIIPPHATLVFDVELLKLE | |
| | GTTCGACAGTAGTAGAGATCGCAATA | | | |
| | AACCTTTCAAATTCATGTTGGGAAAAC | | | |
| | AAGAAGTCATTAGGGGATGGGAGGA | | | |
| | GGGCGTGGCTCAAATGTCCGTCGGC | | | |
| | CAACGCGCTAAGCTCACCATCAGCCC | | | |
| | CGACTACGCATACGGCGCTACCGGA | | | |
| | CATCCCGGAATTATTCCCCCTCACGC | | | |
| | TACCTTGGTGTTTGACGTCGAACTGTT | | | |
| | GAAGCTCGAA | | | |
| MyD88 | atggctgcaggaggtcccggcgcggggtctgcggcc | 2236 | MAAGGPGAGSAAPVSSTSSLPLAALN | 2237 |
| | ccggtctcctccacatcctcccttcccctggctgctctca | | MRVRRRLSLFLNVRTQVAADWTALAEE | |
| | acatgcgagtgcggcgccgcctgtctctgttcttgaacg | | MDFEYLEIRQLETQADPTGRLLDAWQG | |
| | tgcggacacaggtggcggccgactggaccgcgctgg | | RPGASVGRLLDLLTKLGRDDVLLELGP | |
| | cggaggagatggactttgagtacttggagatccggca | | SIEEDCQKYILKQQQEEAEKPLQVAAVD | |
| | actggagacacaagcggaccccactggcaggctgct | | SSVPRTAELAGITTLDDPLGHMPERFDA | |
| | ggacgcctggcagggacgccctggcgcctctgtagg | | FICYCPSDI | |
| | ccgactgctcgatctgcttaccaagctgggccgcgacg | | | |
| | acgtgctgctggagctgggacccagcattgaggagg | | | |
| | attgccaaaagtatatcttgaagcagcagcaggagga | | | |
| | ggctgagaagcctttacaggtggccgctgtagacagc | | | |
| | agtgtcccacggacagcagagctggcgggcatcacc | | | |
| | acacttgatgaccccctggggcatatgcctgagcgtttc | | | |
| | gatgccttcatctgctattgccccagcgacatc | | | |
| Linker | gtcgag | 2238 | VE | 2239 |
| CD40 | aaaaaggtggccaagaagccaaccaataaggcccc | 2240 | KKVAKKPTNKAPHPKQEPQEINFPDDL | 2241 |
| | ccaccccaagcaggagccccaggagatcaattttccc | | PGSNTAAPVQETLHGCQPVTQEDGKE | |
| | gacgatcttcctggctccaacactgctgctccagtgcag | | SRISVQERQ | |
| | gagactttacatggatgccaaccggtcacccaggagg | | | |
| | atggcaaagagagtcgcatctcagtgcaggagagac | | | |
| | ag | | | |
| Linker | ggatctgga | 2242 | GSG | 2243 |
| P2A | GCAACGAATTTTTCCCTGCTGAAACA | 2244 | ATNFSLLKQAGDVEENPGP | 2245 |
| | GGCAGGGGACGTAGAGGAAAATCCT | | | |
| | GGTCCT | | | |
| Linker | atgcatATGCTGGAG | 2246 | MHMLE | 2247 |
| FKBPv | GGAGTGCAGGTGGAGACTATTAGCCC | 2248 | GVQVETISPGDGRTFPKRGQTCVVHYT | 2249 |
| | CGGAGATGGCAGAACATTCCCCAAAA | | GMLEDGKKVDSSRDRNKPFKFMLGKQ | |
| | GAGGACAGACTTGCGTCGTGCATTAT | | EVIRGWEEGVAQMSVGQRAKLTISPDY | |
| | ACTGGAATGCTGGAAGACGGCAAGAA | | AYGATGHPGIIPPHATLVFDVELLKLE | |
| | GGTGGACAGCAGCCGGGACCGAAAC | | | |
| | AAGCCCTTCAAGTTCATGCTGGGGAA | | | |
| | GCAGGAAGTGATCCGGGGCTGGGAG | | | |
| | GAAGGAGTCGCACAGATGTCAGTGG | | | |
| | GACAGAGGGCCAAACTGACTATTAGC | | | |
| | CCAGACTACGCTTATGGAGCAACCGG | | | |
| | CCACCCCGGGATCATTCCCCCTCATG | | | |
| | CTACACTGGTCTTCGATGTGGAGCTG | | | |
| | CTGAAGCTGGAA | | | |
| Linker | TCAGGCGGTGGCTCAGGTGTGGAC | 2250 | SGGGSGVD | 2251 |
| Δcaspase9 | GGATTTGGTGATGTCGGTGCTCTTGA | 2252 | GFGDVGALESLRGNADLAYILSMEPCG | 2253 |
| | GAGTTTGAGGGGAAATGCAGATTTGG | | HCLIINNVNFCRESGLRTRTGSNIDCEK | |
| | CTTACATCCTGAGCATGGAGCCCTGT | | LRRRFSSLHFMVEVKGDLTAKKMVLAL | |
| | GGCCACTGCCTCATTATCAACAATGT | | LELARQDHGALDCCVVVILSHGCQASH | |
| | GAACTTCTGCCGTGAGTCCGGGCTCC | | LQFPGAVYGTDGCPVSVEKIVNIFNGTS | |
| | GCACCCGCACTGGCTCCAACATCGAC | | CPSLGGKPKLFFIQACGGEQKDHGFEV | |
| | TGTGAGAAGTTGCGGCGTCGCTTCTC | | ASTSPEDESPGSNPEPDATPFQEGLRT | |
| | CTCGCTGCATTTCATGGTGGAGGTGA | | FDQLDAISSLPTPSDIFVSYSTFPGFVS | |
| | AGGGCGACCTGACTGCCAAGAAAATG | | WRDPKSGSWYVETLDDIFEQWAHSED | |
| | GTGCTGGCTTTGCTGGAGCTGGCGCg | | LQSLLLRVANAVSVKGIYKQMPGCFNF | |
| | GCAGGACCACGGTGCTCTGGACTGC | | LRKKLFFKTSASRA | |
| | TGCGTGGTGGTCATTCTCTCTCACGG | | | |
| | CTGTCAGGCCAGCCACCTGCAGTTCC | | | |
| | CAGGGGCTGTCTACGGCACAGATGG | | | |
| | ATGCCCTGTGTCGGTCGAGAAGATTG | | | |
| | TGAACATCTTCAATGGGACCAGCTGC | | | |
| | CCCAGCCTGGGAGGGAAGCCCAAGC | | | |
| | TCTTTTTCATCCAGGCCTGTGGTGGG | | | |
| | GAGCAGAAAGAtCATGGGTTTGAGGT | | | |
| | GGCCTCCACTTCCCCTGAAGACGAGT | | | |
| | CCCCTGGCAGTAACCCCGAGCCAGAT | | | |
| | GCCACCCCGTTCCAGGAAGGTTTGAG | | | |
| | GACCTTCGACCAGCTGGACGCCATAT | | | |
| | CTAGTTTGCCCACACCCAGTGACATC | | | |
| | TTTGTGTCCTACTCTACTTTCCCAGGT | | | |
| | TTTGTTTCCTGGAGGGACCCCAAGAG | | | |
| | TGGCTCCTGGTACGTTGAGACCCTGG | | | |
| | ACGACATCTTTGAGCAGTGGGCTCAC | | | |
| | TCTGAAGACCTGCAGTCCCTCCTGCT | | | |
| | TAGGGTCGCTAATGCTGTTTCGGTGA | | | |
| | AAGGGATTTATAAACAGATGCCTGGT | | | |
| | TGCTTTAATTTCCTCCGGAAAAAACTT | | | |
| | TTCTTTAAAACATCAGCTAGCAGAGCC | | | |
| Linker | ggatctggaccgeGG | 2254 | GSGPR | 2255 |
| T2A | GAAGGCCGAGGGAGCCTGCTGACAT | 2256 | EGRGSLLTCGDVEENPGP | 2257 |
| | GTGGCGATGTGGAGGAAAACCCAGG | | | |
| | ACCA | | | |
| Linker | CCACGG | 2258 | PR | 2259 |
| Signal Peptide | ATGGAGTTTGGACTTTCTTGGTTGTTT | 2260 | MEFGLSWLFLVAILKGVQCSR | 2261 |
| | TTGGTGGCAATTCTGAAGGGTGTCCA | | | |
| | GTGTAGCAGG | | | |
| PSCA(A11) VL | GACATCCAACTGACGCAAAGCCCATC | 2262 | DIQLTQSPSTLSASMGDRVTITCSASSS | 2263 |
| | TACACTCAGCGCTAGCATGGGGGACA | | VRFIHWYQQKPGKAPKRLIYDTSKLAS | |
| | GGGTCACAATCACGTGCTCTGCCTCA | | GVPSRFSGSGSGTDFTLTISSLQPEDFA | |
| | AGTTCCGTTAGGTTTATCCATTGGTAT | | TYYCQQWGSSPFTFGQGTKVEIK | |
| | CAGCAGAAACCTGGAAAGGCCCCAAA | | | |
| | AAGACTGATCTATGATACCAGCAAGC | | | |
| | TGGCTTCCGGAGTGCCCTCAAGGTTC | | | |
| | TCAGGATCTGGCAGTGGGACCGATTT | | | |
| | CACCCTGACAATTAGCAGCCTTCAGC | | | |
| | CAGAGGATTTCGCAACCTATTACTGT | | | |
| | CAGCAATGGGGGTCCAGCCCATTCAC | | | |
| | TTTCGGCCAAGGAACAAAGGTGGAGA | | | |
| | TAAAA | | | |
| Flex | GGCGGAGGAAGCGGAGGTGGGGGC | 2264 | gggsgggg | 2265 |
| PSCA(A11) VH | GAGGTGCAGCTCGTGGAGTATGGCG | 2266 | EVQLVEYGGGLVQPGGSLRLSCAASG | 2267 |
| | GGGGCCTGGTGCAGCCTGGGGGTAG | | FNIKDYYIHWVRQAPGKGLEWVAWIDP | |
| | TCTGAGGCTCTCCTGCGCTGCCTCTG | | ENGDTEFVPKFQGRATMSADTSKNTAY | |
| | GCTTTAACATTAAAGACTACTACATAC | | LQMNSLRAEDTAVYYCKTGGFWGQGT | |
| | ATTGGGTGCGGCAGGCCCCAGGCAA | | LVTVSS | |
| | AGGGCTCGAATGGGTGGCCTGGATT | | | |
| | GACCCTGAGAATGGTGACACTGAGTT | | | |
| | TGTCCCCAAGTTTCAGGGCAGAGCCA | | | |
| | CCATGAGCGCTGACACAAGCAAAAAC | | | |
| | ACTGCTTATCTCCAAATGAATAGCCTG | | | |
| | CGAGCTGAAGATACAGCAGTCTATTA | | | |
| | CTGCAAGACGGGAGGATTCTGGGGC | | | |
| | CAGGGAACTCTGGTGACAGTTAGTTCC | | | |
| Linker | GGATCC | 2268 | gs | 2269 |
| CD34 epitope | GAACTTCCTACTCAGGGGACTTTCTC | 2270 | ELPTQGTFSNVSTNVS | 2271 |
| | AAACGTTAGCACAAACGTAAGT | | | |
| CD3ζ | AGAGTGAAGTTCAGCAGGAGCGCAG | 2272 | RVKFSRSADAPAYQQGQNQLYNELNL | 2273 |
| | ACGCCCCCGCGTACCAGCAGGGCCA | | GRREEYDVLDKRRGRDPEMGGKPRRK | |
| | GAACCAGCTCTATAACGAGCTCAATC | | NPQEGLYNELQKDKMAEAYSEIGMKGE | |
| | TAGGACGAAGAGAGGAGTACGATGTT | | RRRGKGHDGLYQGLSTATKDTYDALH | |
| | TTGGACAAGAGACGTGGCCGGGACC | | MQALPPR | |
| | CTGAGATGGGGGGAAAGCCGAGAAG | | | |
| | GAAGAACCCTCAGGAAGGCCTGTACA | | | |
| | ATGAACTGCAGAAAGATAAGATGGCG | | | |
| | GAGGCCTACAGTGAGATTGGGATGAA | | | |
| | AGGCGAGCGCCGGAGGGGCAAGGG | | | |
| | GCACGATGGCCTTTACCAGGGTCTCA | | | |
| | GTACAGCCACCAAGGACACCTACGAC | | | |
| | GCCCTTCACATGCAAGCTCTTCCACC | | | |
| | TCGT | | | |

APPENDIX 34
pBP1759—pSFG--FRB_{L}.FKBP_{wt}.MC-P2A.FKBPv.ΔC9.T2A-αHER2.Q.CD8stm.ζ

| | | SEQ ID | | |
|---|---|---|---|---|
| Fragment | Nucleotide | NO: | Peptide | SEQ ID NO: |
| FRB_{L} | ATGTTGGAAATGTGGCATGAAGGGTT | 2274 | MLEMWFIEGLEEASRLYFGERNVKGMF | 2275 |
| | GGAAGAAGCTTCAAGGCTGTACTTCG | | EVLEPLHAMMERGPQTLKETSFNQAYG | |
| | GAGAGAGGAACGTGAAGGGCATGTTT | | RDLMEAQEWCRKYMKSGNVKDLLQA | |
| | GAGGTTCTTGAACCTCTGCACGCCAT | | WDLYYHVFRRISK | |
| | GATGGAACGGGGACCGCAGACACTG | | | |
| | AAAGAAACCTCTTTTAATCAGGCCTAC | | | |
| | GGCAGAGACCTGATGGAGGCCCAAG | | | |
| | AATGGTGTAGAAAGTATATGAAATCC | | | |
| | GGTAACGTGAAAGACCTGCTCCAGGC | | | |
| | CTGGGACCTTTATTACCATGTGTTCAG | | | |
| | GCGGATCAGTAAG | | | |
| Linker | gtcgag | 2276 | VE | 2277 |
| FKBP_{WT}′ | GGCGTCCAAGTCGAAACCATTAGTCC | 2278 | GVQVETISPGDGRTFPKRGQTCVVHYT | 2279 |
| | CGGCGATGGCAGAACATTTCCTACAA | | GMLEDGKKFDSSRDRNKPFKFMLGKQ | |
| | GGGGACAAACATGTGTCGTCCATTAT | | EVIRGWEEGVAQMSVGQRAKLTISPDY | |
| | ACAGGCATGTTGGAGGACGGCAAAAA | | AYGATGHPGIIPPHATLVFDVELLKLE | |
| | GTTCGACAGTAGTAGAGATCGCAATA | | | |
| | AACCTTTCAAATTCATGTTGGGAAAAC | | | |
| | AAGAAGTCATTAGGGGATGGGAGGA | | | |
| | GGGCGTGGCTCAAATGTCCGTCGGC | | | |
| | CAACGCGCTAAGCTCACCATCAGCCC | | | |
| | CGACTACGCATACGGCGCTACCGGA | | | |
| | CATCCCGGAATTATTCCCCCTCACGC | | | |
| | TACCTTGGTGTTTGACGTCGAACTGTT | | | |
| | GAAGCTCGAA | | | |
| MyD88 | atggctgcaggaggtcccggcgcggggtctgcggcc | 2280 | MAAGGPGAGSAAPVSSTSSLPLAALN | 2281 |
| | ccggtctcctccacatcctcccttcccctggctgctctca | | MRVRRRLSLFLNVRTQVAADWTALAEE | |
| | acatgcgagtgcggcgccgcctgtctctgttcttgaacg | | MDFEYLEIRQLETQADPTGRLLDAWQG | |
| | tgcggacacaggtggcggccgactggaccgcgctgg | | RPGASVGRLLDLLTKLGRDDVLLELGP | |
| | cggaggagatggactttgagtacttggagatccggca | | SIEEDCQKYILKQQQEEAEKPLQVAAVD | |
| | actggagacacaagcggaccccactggcaggctgct | | SSVPRTAELAGITTLDDPLGHMPERFDA | |
| | ggacgcctggcagggacgccctggcgcctctgtagg | | FICYCPSDI | |
| | ccgactgctcgatctgcttaccaagctgggccgcgacg | | | |
| | acgtgctgctggagctgggacccagcattgaggagg | | | |
| | attgccaaaagtatatcttgaagcagcagcaggagga | | | |
| | ggctgagaagcctttacaggtggccgctgtagacagc | | | |
| | agtgtcccacggacagcagagctggcgggcatcacc | | | |
| | acacttgatgaccccctggggcatatgcctgagcgtttc | | | |
| | gatgccttcatctgctattgccccagcgacatc | | | |
| Linker | gtcgag | 2282 | VE | 2283 |
| CD40 | aaaaaggtggccaagaagccaaccaataaggcccc | 2284 | KKVAKKPTNKAPHPKQEPQEINFPDDL | 2285 |
| | ccaccccaagcaggagccccaggagatcaattttccc | | PGSNTAAPVQETLHGCQPVTQEDGKE | |
| | gacgatcttcctggctccaacactgctgctccagtgcag | | SRISVQERQ | |
| | gagactttacatggatgccaaccggtcacccaggagg | | | |
| | atggcaaagagagtcgcatctcagtgcaggagagac | | | |
| | ag | | | |
| Linker | ggatctgga | 2286 | GSG | 2287 |
| P2A | GCAACGAATTTTTCCCTGCTGAAACA | 2288 | ATNFSLLKQAGDVEENPGP | 2289 |
| | GGCAGGGGACGTAGAGGAAAATCCT | | | |
| | GGTCCT | | | |
| Linker | atgcatATGCTGGAG | 2290 | MHMLE | 2291 |
| FKBPv | GGAGTGCAGGTGGAGACTATTAGCCC | 2292 | GVQVETISPGDGRTFPKRGQTCVVHYT | 2293 |
| | CGGAGATGGCAGAACATTCCCCAAAA | | GMLEDGKKVDSSRDRNKPFKFMLGKQ | |
| | GAGGACAGACTTGCGTCGTGCATTAT | | EVIRGWEEGVAQMSVGQRAKLTISPDY | |
| | ACTGGAATGCTGGAAGACGGCAAGAA | | AYGATGHPGIIPPHATLVFDVELLKLE | |
| | GGTGGACAGCAGCCGGGACCGAAAC | | | |
| | AAGCCCTTCAAGTTCATGCTGGGGAA | | | |
| | GCAGGAAGTGATCCGGGGCTGGGAG | | | |
| | GAAGGAGTCGCACAGATGTCAGTGG | | | |
| | GACAGAGGGCCAAACTGACTATTAGC | | | |
| | CCAGACTACGCTTATGGAGCAACCGG | | | |
| | CCACCCCGGGATCATTCCCCCTCATG | | | |
| | CTACACTGGTCTTCGATGTGGAGCTG | | | |
| | CTGAAGCTGGAA | | | |
| Linker | TCAGGCGGTGGCTCAGGTGTGGAC | 2294 | SGGGSGVD | 2295 |
| Δcaspase9 | GGATTTGGTGATGTCGGTGCTCTTGA | 2296 | GFGDVGALESLRGNADLAYILSMEPCG | 2297 |
| | GAGTTTGAGGGGAAATGCAGATTTGG | | HCLIINNVNFCRESGLRTRTGSNIDCEK | |
| | CTTACATCCTGAGCATGGAGCCCTGT | | LRRRFSSLHFMVEVKGDLTAKKMVLAL | |
| | GGCCACTGCCTCATTATCAACAATGT | | LELARQDHGALDCCVVVILSHGCQASH | |
| | GAACTTCTGCCGTGAGTCCGGGCTCC | | LQFPGAVYGTDGCPVSVEKIVNIFNGTS | |
| | GCACCCGCACTGGCTCCAACATCGAC | | CPSLGGKPKLFFIQACGGEQKDHGFEV | |
| | TGTGAGAAGTTGCGGCGTCGCTTCTC | | ASTSPEDESPGSNPEPDATPFQEGLRT | |
| | CTCGCTGCATTTCATGGTGGAGGTGA | | FDQLDAISSLPTPSDIFVSYSTFPGFVS | |
| | AGGGCGACCTGACTGCCAAGAAAATG | | WRDPKSGSWYVETLDDIFEQWAHSED | |
| | GTGCTGGCTTTGCTGGAGCTGGCGCg | | LQSLLLRVANAVSVKGIYKQMPGCFNF | |
| | GCAGGACCACGGTGCTCTGGACTGC | | LRKKLFFKTSASRA | |
| | TGCGTGGTGGTCATTCTCTCTCACGG | | | |
| | CTGTCAGGCCAGCCACCTGCAGTTCC | | | |
| | CAGGGGCTGTCTACGGCACAGATGG | | | |
| | ATGCCCTGTGTCGGTCGAGAAGATTG | | | |
| | TGAACATCTTCAATGGGACCAGCTGC | | | |
| | CCCAGCCTGGGAGGGAAGCCCAAGC | | | |
| | TCTTTTTCATCCAGGCCTGTGGTGGG | | | |
| | GAGCAGAAAGAtCATGGGTTTGAGGT | | | |
| | GGCCTCCACTTCCCCTGAAGACGAGT | | | |
| | CCCCTGGCAGTAACCCCGAGCCAGAT | | | |
| | GCCACCCCGTTCCAGGAAGGTTTGAG | | | |
| | GACCTTCGACCAGCTGGACGCCATAT | | | |
| | CTAGTTTGCCCACACCCAGTGACATC | | | |
| | TTTGTGTCCTACTCTACTTTCCCAGGT | | | |
| | TTTGTTTCCTGGAGGGACCCCAAGAG | | | |
| | TGGCTCCTGGTACGTTGAGACCCTGG | | | |
| | ACGACATCTTTGAGCAGTGGGCTCAC | | | |
| | TCTGAAGACCTGCAGTCCCTCCTGCT | | | |
| | TAGGGTCGCTAATGCTGTTTCGGTGA | | | |
| | AAGGGATTTATAAACAGATGCCTGGT | | | |
| | TGCTTTAATTTCCTCCGGAAAAAACTT | | | |
| | TTCTTTAAAACATCAGCTAGCAGAGCC | | | |
| Linker | ggatctggaccgcGG | 2298 | GSGPR | 2299 |
| T2A | GAAGGCCGAGGGAGCCTGCTGACAT | 2300 | EGRGSLLTCGDVEENPGP | 2301 |
| | GTGGCGATGTGGAGGAAAACCCAGG | | | |
| | ACCA | | | |
| Linker | GCATGCGCCACC | 2302 | ACAT | 2303 |
| Signal Peptide | ATGGAGTTTGGGTTGTCATGGTTGTTT | 2304 | MEFGLSWLFLVAILKGVQCSR | 2305 |
| | CTCGTCGCTATTCTCAAAGGTGTACA | | | |
| | ATGCTCCCGC | | | |
| HER2(FRP5) VH | GAAGTCCAATTGCAACAGTCAGGCCC | 2306 | EVQLQQSGPELKKPGETVKISCKASGY | 2307 |
| | CGAATTGAAAAAGCCCGGCGAAACAG | | PFTNYGMNWVKQAPGQGLKWMGWIN | |
| | TGAAGATATCTTGTAAAGCCTCCGGTT | | TSTGESTFADDFKGRFDFSLETSANTA | |
| | ACCCTTTTACGAACTATGGAATGAACT | | YLQINNLKSEDMATYFCARWEVYHGYV | |
| | GGGTCAAACAAGCCCCTGGACAGGG | | PYWGQGTTVTVSS | |
| | ATTGAAGTGGATGGGATGGATCAATA | | | |
| | CATCAACAGGCGAGTCTACCTTCGCA | | | |
| | GATGATTTCAAAGGTCGCTTTGACTTC | | | |
| | TCACTGGAGACCAGTGCAAATACCGC | | | |
| | CTACCTTCAGATTAACAATCTTAAAAG | | | |
| | CGAGGATATGGCAACCTACTTTTGCG | | | |
| | CAAGATGGGAAGTTTATCACGGGTAC | | | |
| | GTGCCATACTGGGGACAAGGAACGA | | | |
| | CAGTGACAGTTAGTAGC | | | |
| Flex | GGCGGTGGAGGCTCCGGTGGAGGCG | 2308 | GGGGSGGGGSGGGGS | 2309 |
| | GCTCTGGAGGAGGAGGTTCA | | | |
| HER2(FRP5) VL | GACATCCAATTGACACAATCACACAAA | 2310 | EVQLVEYGGGLVQPGGSLRLSCAASG | 2311 |
| | TTTCTCTCAACTTCTGTAGGAGACAGA | | FNIKDYYIHWVRQAPGKGLEWVAWIDP | |
| | GTGAGCATAACCTGCAAAGCATCCCA | | ENGDTEFVPKFQGRATMSADTSKNTAY | |
| | GGACGTGTACAATGCTGTGGCTTGGT | | LQMNSLRAEDTAVYYCKTGGFWGQGT | |
| | ACCAACAGAAGCCTGGACAATCCCCA | | LVTVSS | |
| | AAATTGCTGATTTATTCTGCCTCTAGT | | | |
| | AGGTACACTGGGGTACCTTCTCGGTT | | | |
| | TACGGGCTCTGGGTCCGGACCAGATT | | | |
| | TCACGTTCACAATCAGTTCCGTTCAAG | | | |
| | CTGAAGACCTCGCTGTTTATTTTTGCC | | | |
| | AGCAGCACTTCCGAACCCCTTTTACTT | | | |
| | TTGGCTCAGGCACTAAGTTGGAAATC | | | |
| | AAGGCTTTG | | | |
| Linker | atgcat | 2312 | MH | 2313 |
| CD34 epitope | GAACTTCCTACTCAGGGGACTTTCTC | 2314 | ELPTQGTFSNVSTNVS | 2315 |
| | AAACGTTAGCACAAACGTAAGT | | | |
| CD3ζ | AGAGTGAAGTTCAGCAGGAGCGCAG | 2316 | RVKFSRSADAPAYQQGQNQLYNELNL | 2317 |
| | ACGCCCCCGCGTACCAGCAGGGCCA | | GRREEYDVLDKRRGRDPEMGGKPRRK | |
| | GAACCAGCTCTATAACGAGCTCAATC | | NPQEGLYNELQKDKMAEAYSEIGMKGE | |
| | TAGGACGAAGAGAGGAGTACGATGTT | | RRRGKGHDGLYQGLSTATKDTYDALH | |
| | TTGGACAAGAGACGTGGCCGGGACC | | MQALPPR | |
| | CTGAGATGGGGGGAAAGCCGAGAAG | | | |
| | GAAGAACCCTCAGGAAGGCCTGTACA | | | |
| | ATGAACTGCAGAAAGATAAGATGGCG | | | |
| | GAGGCCTACAGTGAGATTGGGATGAA | | | |
| | AGGCGAGCGCCGGAGGGGCAAGGG | | | |
| | GCACGATGGCCTTTACCAGGGTCTCA | | | |
| | GTACAGCCACCAAGGACACCTACGAC | | | |
| | GCCCTTCACATGCAAGCTCTTCCACC | | | |
| | TCGT | | | |

APPENDIX 35
pBP1796—pSFG--FKBP_{wt}.FRB_{L}-MC. P2A.FKBPv.ΔC9.T2A-αPSCA.Q.CD8stm.ζ

| | | SEQ ID | | |
|---|---|---|---|---|
| Fragment | Nucleotide | NO: | Peptide | SEQ ID NO: |
| FKBP_{WT}′ | atgGGCGTCCAAGTCGAAACCATTAGT | 2318 | MGVQVETISPGDGRTFPKRGQTCVVH | 2319 |
| | CCCGGCGATGGCAGAACATTTCCTAC | | YTGMLEDGKKFDSSRDRNKPFKFMLG | |
| | AAGGGGACAAACATGTGTCGTCCATT | | KQEVIRGWEEGVAQMSVGQRAKLTISP | |
| | ATACAGGCATGTTGGAGGACGGCAAA | | DYAYGATGHPGIIPPHATLVFDVELLKLE | |
| | AAGTTCGACAGTAGTAGAGATCGCAA | | | |
| | TAAACCTTTCAAATTCATGTTGGGAAA | | | |
| | ACAAGAAGTCATTAGGGGATGGGAGG | | | |
| | AGGGCGTGGCTCAAATGTCCGTCGG | | | |
| | CCAACGCGCTAAGCTCACCATCAGCC | | | |
| | CCGACTACGCATACGGCGCTACCGG | | | |
| | ACATCCCGGAATTATTCCCCCTCACG | | | |
| | CTACCTTGGTGTTTGACGTCGAACTG | | | |
| | TTGAAGCTCGAA | | | |
| Linker | GGATCAGGCGGTGGCAGCGGCCAAT | 2320 | gSGGGSGel | 2321 |
| | TG | | | |
| FRB_{L} | ATGTTGGAAATGTGGCATGAAGGGTT | 2322 | MLEMWFIEGLEEASRLYFGERNVKGMF | 2323 |
| | GGAAGAAGCTTCAAGGCTGTACTTCG | | EVLEPLHAMMERGPQTLKETSFNQAYG | |
| | GAGAGAGGAACGTGAAGGGCATGTTT | | RDLMEAQEWCRKYMKSGNVKDLLQA | |
| | GAGGTTCTTGAACCTCTGCACGCCAT | | WDLYYHVFRRISK | |
| | GATGGAACGGGGACCGCAGACACTG | | | |
| | AAAGAAACCTCTTTTAATCAGGCCTAC | | | |
| | GGCAGAGACCTGATGGAGGCCCAAG | | | |
| | AATGGTGTAGAAAGTATATGAAATCC | | | |
| | GGTAACGTGAAAGACCTGCTCCAGGC | | | |
| | CTGGGACCTTTATTACCATGTGTTCAG | | | |
| | GCGGATCAGTAAG | | | |
| Linker | ggcagtggaGGCGGG | 2324 | Gsgggm | 2325 |
| MyD88 | atggctgcaggaggtcccggcgcggggtctgcggcc | 2326 | MAAGGPGAGSAAPVSSTSSLPLAALN | 2327 |
| | ccggtctcctccacatcctcccttcccctggctgctctca | | MRVRRRLSLFLNVRTQVAADWTALAEE | |
| | acatgcgagtgcggcgccgcctgtctctgttcttgaacg | | MDFEYLEIRQLETQADPTGRLLDAWQG | |
| | tgcggacacaggtggcggccgactggaccgcgctgg | | RPGASVGRLLDLLTKLGRDDVLLELGP | |
| | cggaggagatggactttgagtacttggagatccggca | | SIEEDCQKYILKQQQEEAEKPLQVAAVD | |
| | actggagacacaagcggaccccactggcaggctgct | | SSVPRTAELAGITTLDDPLGHMPERFDA | |
| | ggacgcctggcagggacgccctggcgcctctgtagg | | FICYCPSDI | |
| | ccgactgctcgatctgcttaccaagctgggccgcgacg | | | |
| | acgtgctgctggagctgggacccagcattgaggagg | | | |
| | attgccaaaagtatatcttgaagcagcagcaggagga | | | |
| | ggctgagaagcctttacaggtggccgctgtagacagc | | | |
| | agtgtcccacggacagcagagctggcgggcatcacc | | | |
| | acacttgatgaccccctggggcatatgcctgagcgtttc | | | |
| | gatgccttcatctgctattgccccagcgacatc | | | |
| Linker | gtcgag | 2328 | VE | 2329 |
| CD40 | aaaaaggtggccaagaagccaaccaataaggcccc | 2330 | KKVAKKPTNKAPHPKQEPQEINFPDDL | 2331 |
| | ccaccccaagcaggagccccaggagatcaattttccc | | PGSNTAAPVQETLHGCQPVTQEDGKE | |
| | gacgatcttcctggctccaacactgctgctccagtgcag | | SRISVQERQ | |
| | gagactttacatggatgccaaccggtcacccaggagg | | | |
| | atggcaaagagagtcgcatctcagtgcaggagagac | | | |
| | ag | | | |
| Linker | ggatctgga | 2332 | GSG | 2333 |
| P2A | GCAACGAATTTTTCCCTGCTGAAACA | 2334 | ATNFSLLKQAGDVEENPGP | 2335 |
| | GGCAGGGGACGTAGAGGAAAATCCT | | | |
| | GGTCCT | | | |
| Linker | atgcatATGCTGGAG | 2336 | MHMLE | 2337 |
| FKBPv | GGAGTGCAGGTGGAGACTATTAGCCC | 2338 | GVQVETISPGDGRTFPKRGQTCVVHYT | 2339 |
| | CGGAGATGGCAGAACATTCCCCAAAA | | GMLEDGKKVDSSRDRNKPFKFMLGKQ | |
| | GAGGACAGACTTGCGTCGTGCATTAT | | EVIRGWEEGVAQMSVGQRAKLTISPDY | |
| | ACTGGAATGCTGGAAGACGGCAAGAA | | AYGATGHPGIIPPHATLVFDVELLKLE | |
| | GGTGGACAGCAGCCGGGACCGAAAC | | | |
| | AAGCCCTTCAAGTTCATGCTGGGGAA | | | |
| | GCAGGAAGTGATCCGGGGCTGGGAG | | | |
| | GAAGGAGTCGCACAGATGTCAGTGG | | | |
| | GACAGAGGGCCAAACTGACTATTAGC | | | |
| | CCAGACTACGCTTATGGAGCAACCGG | | | |
| | CCACCCCGGGATCATTCCCCCTCATG | | | |
| | CTACACTGGTCTTCGATGTGGAGCTG | | | |
| | CTGAAGCTGGAA | | | |
| Linker | TCAGGCGGTGGCTCAGGTGTGGAC | 2340 | SGGGSGVD | 2341 |
| Δcaspase9 | GGATTTGGTGATGTCGGTGCTCTTGA | 2342 | GFGDVGALESLRGNADLAYILSMEPCG | 2343 |
| | GAGTTTGAGGGGAAATGCAGATTTGG | | HCLIINNVNFCRESGLRTRTGSNIDCEK | |
| | CTTACATCCTGAGCATGGAGCCCTGT | | LRRRFSSLHFMVEVKGDLTAKKMVLAL | |
| | GGCCACTGCCTCATTATCAACAATGT | | LELARQDHGALDCCVVVILSHGCQASH | |
| | GAACTTCTGCCGTGAGTCCGGGCTCC | | LQFPGAVYGTDGCPVSVEKIVNIFNGTS | |
| | GCACCCGCACTGGCTCCAACATCGAC | | CPSLGGKPKLFFIQACGGEQKDHGFEV | |
| | TGTGAGAAGTTGCGGCGTCGCTTCTC | | ASTSPEDESPGSNPEPDATPFQEGLRT | |
| | CTCGCTGCATTTCATGGTGGAGGTGA | | FDQLDAISSLPTPSDIFVSYSTFPGFVS | |
| | AGGGCGACCTGACTGCCAAGAAAATG | | WRDPKSGSWYVETLDDIFEQWAHSED | |
| | GTGCTGGCTTTGCTGGAGCTGGCGCg | | LQSLLLRVANAVSVKGIYKQMPGCFNF | |
| | GCAGGACCACGGTGCTCTGGACTGC | | LRKKLFFKTSASRA | |
| | TGCGTGGTGGTCATTCTCTCTCACGG | | | |
| | CTGTCAGGCCAGCCACCTGCAGTTCC | | | |
| | CAGGGGCTGTCTACGGCACAGATGG | | | |
| | ATGCCCTGTGTCGGTCGAGAAGATTG | | | |
| | TGAACATCTTCAATGGGACCAGCTGC | | | |
| | CCCAGCCTGGGAGGGAAGCCCAAGC | | | |
| | TCTTTTTCATCCAGGCCTGTGGTGGG | | | |
| | GAGCAGAAAGAtCATGGGTTTGAGGT | | | |
| | GGCCTCCACTTCCCCTGAAGACGAGT | | | |
| | CCCCTGGCAGTAACCCCGAGCCAGAT | | | |
| | GCCACCCCGTTCCAGGAAGGTTTGAG | | | |
| | GACCTTCGACCAGCTGGACGCCATAT | | | |
| | CTAGTTTGCCCACACCCAGTGACATC | | | |
| | TTTGTGTCCTACTCTACTTTCCCAGGT | | | |
| | TTTGTTTCCTGGAGGGACCCCAAGAG | | | |
| | TGGCTCCTGGTACGTTGAGACCCTGG | | | |
| | ACGACATCTTTGAGCAGTGGGCTCAC | | | |
| | TCTGAAGACCTGCAGTCCCTCCTGCT | | | |
| | TAGGGTCGCTAATGCTGTTTCGGTGA | | | |
| | AAGGGATTTATAAACAGATGCCTGGT | | | |
| | TGCTTTAATTTCCTCCGGAAAAAACTT | | | |
| | TTCTTTAAAACATCAGCTAGCAGAGCC | | | |
| Linker | ggatctggaccgcGG | 2344 | GSGPR | 2345 |
| T2A | GAAGGCCGAGGGAGCCTGCTGACAT | 2346 | EGRGSLLTCGDVEENPGP | 2347 |
| | GTGGCGATGTGGAGGAAAACCCAGG | | | |
| | ACCA | | | |
| Linker | CCACGG | 2348 | PR | 2349 |
| Signal Peptide | ATGGAGTTTGGACTTTCTTGGTTGTTT | 2350 | MEFGLSWLFLVAILKGVQCSR | 2351 |
| | TTGGTGGCAATTCTGAAGGGTGTCCA | | | |
| | GTGTAGCAGG | | | |
| PSCA(A11) VL | GACATCCAACTGACGCAAAGCCCATC | 2352 | DIQLTQSPSTLSASMGDRVTITCSASSS | 2353 |
| | TACACTCAGCGCTAGCATGGGGGACA | | VRFIHWYQQKPGKAPKRLIYDTSKLAS | |
| | GGGTCACAATCACGTGCTCTGCCTCA | | GVPSRFSGSGSGTDFTLTISSLQPEDFA | |
| | AGTTCCGTTAGGTTTATCCATTGGTAT | | TYYCQQWGSSPFTFGQGTKVEIK | |
| | CAGCAGAAACCTGGAAAGGCCCCAAA | | | |
| | AAGACTGATCTATGATACCAGCAAGC | | | |
| | TGGCTTCCGGAGTGCCCTCAAGGTTC | | | |
| | TCAGGATCTGGCAGTGGGACCGATTT | | | |
| | CACCCTGACAATTAGCAGCCTTCAGC | | | |
| | CAGAGGATTTCGCAACCTATTACTGT | | | |
| | CAGCAATGGGGGTCCAGCCCATTCAC | | | |
| | TTTCGGCCAAGGAACAAAGGTGGAGA | | | |
| | TAAAA | | | |
| Flex | GGCGGAGGAAGCGGAGGTGGGGGC | 2354 | gggsgggg | 2355 |
| PSCA(A11) VH | GAGGTGCAGCTCGTGGAGTATGGCG | 2356 | EVQLVEYGGGLVQPGGSLRLSCAASG | 2357 |
| | GGGCCTGGTGCAGCCTGGGGGTAG | | FNIKDYYIHWVRQAPGKGLEWVAWIDP | |
| | TCTGAGGCTCTCCTGCGCTGCCTCTG | | ENGDTEFVPKFQGRATMSADTSKNTAY | |
| | GCTTTAACATTAAAGACTACTACATAC | | LQMNSLRAEDTAVYYCKTGGFWGQGT | |
| | ATTGGGTGCGGCAGGCCCCAGGCAA | | LVTVSS | |
| | AGGGCTCGAATGGGTGGCCTGGATT | | | |
| | GACCCTGAGAATGGTGACACTGAGTT | | | |
| | TGTCCCCAAGTTTCAGGGCAGAGCCA | | | |
| | CCATGAGCGCTGACACAAGCAAAAAC | | | |
| | ACTGCTTATCTCCAAATGAATAGCCTG | | | |
| | CGAGCTGAAGATACAGCAGTCTATTA | | | |
| | CTGCAAGACGGGAGGATTCTGGGGC | | | |
| | CAGGGAACTCTGGTGACAGTTAGTTCC | | | |
| Linker | GGATCC | 2358 | gs | 2359 |
| CD34 epitope | GAACTTCCTACTCAGGGGACTTTCTC | 2360 | ELPTQGTFSNVSTNVS | 2361 |
| | AAACGTTAGCACAAACGTAAGT | | | |
| CD3ζ | AGAGTGAAGTTCAGCAGGAGCGCAG | 2362 | RVKFSRSADAPAYQQGQNQLYNELNL | 2363 |
| | ACGCCCCCGCGTACCAGCAGGGCCA | | GRREEYDVLDKRRGRDPEMGGKPRRK | |
| | GAACCAGCTCTATAACGAGCTCAATC | | NPQEGLYNELQKDKMAEAYSEIGMKGE | |
| | TAGGACGAAGAGAGGAGTACGATGTT | | RRRGKGHDGLYQGLSTATKDTYDALH | |
| | TTGGACAAGAGACGTGGCCGGGACC | | MQALPPR | |
| | CTGAGATGGGGGGAAAGCCGAGAAG | | | |
| | GAAGAACCCTCAGGAAGGCCTGTACA | | | |
| | ATGAACTGCAGAAAGATAAGATGGCG | | | |
| | GAGGCCTACAGTGAGATTGGGATGAA | | | |
| | AGGCGAGCGCCGGAGGGGCAAGGG | | | |
| | GCACGATGGCCTTTACCAGGGTCTCA | | | |
| | GTACAGCCACCAAGGACACCTACGAC | | | |
| | GCCCTTCACATGCAAGCTCTTCCACC | | | |
| | TCGT | | | |

### Example 30: Dual Control of Apoptosis

[0876] The present Example provides examples of chimeric pro-apoptotic polypeptides that include dual molecular switches, providing a choice of ligand for activating apoptosis. Chimeric dual-controlled Caspase-9 polypeptides were prepared and assayed for apoptotic activity.

[0877] In this example, in vitro data is provided that compares the apoptotic induction of various Caspase-9 molecular switches in response to rimiducid and rapamycin treatment in 293 and primary human T cells. T cells expressing these three caspase-9 switches when introduced into NSG mice are efficiently eliminated within 24 hours of exposure to their respective activating ligands. Finally, dose titration of the FRB.FKBP_{V}.ΔC9 switch in vivo demonstrated that both rimiducid and rapamycin stimulated efficient removal of T cells with drug concentrations as low as 1 mg/kg.

### Methods

[0878] Peripheral blood mononuclear cells (PBMCs) were isolated from buffy coats obtained through the Gulf Coast Regional Blood Center. Buffy coats tested negative for infectious viral pathogens.

### Activation and Transduction of T Cells

[0879] Production of retrovirus by transient transfection of 293T, and activation of T cells were performed essentially as discussed herein. T cells were transduced with pBP1501, pBP0220, pBP1310, pBP1311, pBP1327, pBP1328 vectors.

### Phenotyping and In Vivo Cell Enumeration

[0880] Transduction efficiency was determined by flow cytometry using anti-CD3-PerCP.Cy5.5 and anti-CD19-APC antibodies. Following mouse sacrifice, total transduced T cell numbers in the spleens were calculated by counting total splenocyte numbers and multiplying by the percentage of CD3⁺CD34⁺ T cells observed by flow cytometry. To examine the phenotype of T cells in mice, spleens were isolated and single-cell suspensions were made by lysing red cells with ammonia chloride/potassium (ACK)-based lysis buffer followed by mechanical dissociation through a 70-μm nylon filter. Cells were subsequently stained with the following antibodies: anti-hCD3-PerCP.Cy5.5, anti-hCD19-APC, and anti-mCD45RA-BV510.

### SRα SEAP Assay in 293 Cells

[0881] On day 0, 5×10⁶ 293 cells were seeded onto 6-well plates in 2 ml DMEM medium (10% FBS+1% pen/strep). On day 1, cells were co-transfected with 1 μg each of pBP1501, pBP0220, pBP1310, pBP1311, pBP1327, pBP1328 vectors and the SRα-SEAP reporter plasmid (pBP0046). On day 2, cells were collected, and seeded onto 96-well plates containing 2× concentrated half-log drug dilutions and also analyzed by FACS for transfection efficiency. On day 3, the drug-treated cells were heat inactivated at 68° C. for 1 hour and supernatants were added to black 96-well plate containing 1 mM MUP substrate (2× concentration) diluted in 2M diethanolamine. The plates were incubated at 37° C. for 30 min and absorbance at 405 nm was measured.

### Western Blot Analysis

[0882] After transduction with the appropriate retrovirus, 6×10⁶ T cells were seeded per well into 6-well plates in 3 ml CTL medium. Twenty-four hours later, cells were collected, washed in cold PBS, and lysed in RIPA Lysis and Extraction Buffer (Thermo, 89901), containing 1× Halt Protease Inhibitor Cocktail (Thermo, 87786) on ice for 30 min in the plated. The lysates were centrifuged at 16,000×g for 20 min at 4° C. and the supernatants were transferred to new Eppendorf tubes. Protein assays were performed using the Pierce BCA Protein Assay Kit (Thermo, 23227) per manufacturer's recommendation. To prepare samples for SDS-PAGE, 50 μg of lysates was mixed with 4× Laemmli Sample Buffer (Bio Rad, 1610747) and heated at 95° C. for 10 min. Meanwhile, 10% SDS gels were prepared using a Bio Rad casting apparatus and 30% Acrylamide/bis Solution (Bio Rad, 160158). The samples were loaded at equal levels of total protein along with Precision Plus Protein Dual Color Standards (Bio Rad, 1610374) and run in 1× Tris/glycine Running Buffer (Bio Rad, 1610771) at 140 V for 90 min. After protein separation, gels were transferred onto PVDF membranes using Program 0 (7 min total) in the iBlot 2 device (Thermo, IB21001). Membranes were subsequently probed with primary and secondary antibodies using the iBind Flex Western Device (Thermo, SLF2000) according to manufacturer's recommendation. Anti-caspase-9 antibody (Thermo, PA1-12506) was used at 1:200 dilution and the secondary HRP-conjugated goat anti-rabbit IgG antibody (Thermo, A16104) was used at 1:500 dilution. The β-actin antibody (Thermo, PA1-16889) was used at 1:1000 dilution and the secondary HRP-conjugated goat anti-rabbit IgG antibody (Thermo, A16104) was used at 1:1000 dilution. The membranes were developed using the SuperSignal West Femto Maximum Sensitivity Substrate Kit (Thermo, 34096) and imaged using the GelLogic 6000 Pro camera and the CareStream MI software (v.5.3.1.16369).

### In Vitro T Cell Caspase Activation Assay Using the IncuCyte

[0883] After transduction with the appropriate retrovirus, 5×10⁴ T cells were seeded per well into a 96-well plate in the presence or absence of drugs (rimiducid or rapamycin) in CTL medium in the presence of IL-2. To enable detection of apoptosis using the IncuCyte instrument, 2 μM of IncuCyte™ Kinetic Caspase-3/7 Apoptosis reagent (Essen Bioscience, 4440) was added to each well to reach a total volume of 200 μl. The plates were centrifuged for 5 min at 400×g and placed inside the IncuCyte (Dual Color Model 4459) to monitor green fluorescence every 2-3 hours for a total of 48 hours at 10× objective. Image analysis was performed using the “Tcells_caspreagent_phase_green_10×_MLD” processing definition. The “Total Green Object Integrated Intensity” metric and the “Phase Object Confluence (Percent)” were used to quantify caspase activation. Each condition was performed in duplicate and each well was imaged at 4 different locations.

$$“ caspase 3 \text{/} 7 activation ” readout = \frac{\begin{matrix}Metric \text{:} Total Green Object Integrated \\ Intensity ( GCU \times μ {m}^{2} / Image )\end{matrix}}{Metric \text{:} Phase Object Confluence ( Percent )}$$

Animal Model 8-week-old female, immune-deficient mice (NOD.CgPrkdc^{scid}II2rg^{tm1Wjl}/SzJ; NSG) were injected IV with 1×10⁶ T cells in 100 μl PBS. Mice were subjected to IVIS imaging ˜4 hrs after T cell injection (−14 hrs post-drug administration). The following day, mice were imaged just before drug injection (0 hrs), then injected IP with vehicle, rimiducid diluted in solutol and PBS, or rapamycin diluted in “PT”. Mice were imaged again at 5-6 hrs, and 24 hrs after drug injection. Mice were sacrificed and spleens were removed for FACS analysis.

### In Vivo Bioluminescence Imaging

[0884] Mice were imaged for firefly luciferase-derived bioluminescence at the indicated time points relative to administration of drug or vehicle.

[0885] Results

### Topology of FRB and FKBP in Chimeric Caspase-9 Polypeptides

[0886] Since the order and spacing of signaling elements and binding domains may affect outcomes, the order of ligand-binding domains with the inducible chimeric Caspase-9 polypeptides was examined (FRB.FKBP.ΔC9 (pBP1310) and FKBP.FRB.ΔC9 (pBP1311)) (FIG. 106A). A caspase activation assay that utilizes the caspase 3/7 green reagent (in which caspase activity is captured by the cleavage of the peptide reagent which releases a green fluorophore, green fluorescencent emission thereby marks cells undergoing apoptosis) revealed that FRB.FKBP.ΔC9 is slightly more sensitive than FKBP.FRB.ΔC9 to rapamycin-mediated initiation of apoptosis in T cells (FIG. 106B). This modest difference may be attributed to higher FRB.FKBP.ΔC9 protein level compared to that of the FKBP.FRB.ΔC9 (FIG. 106C).

[0887] Since the chimeric iRC9 caspase polypeptide contains the wild-type FKBP domain, it was necessary to determine the concentration of rimiducid capable of triggering dimerization and caspase activation. In this assay, 293 cells were transiently transfected with vectors expressing FKBPv36 Caspase-9 (iC9) and the two similar rapamycin-inducible variants (FRB.FKBP.ΔC9 and FKBP.FRB.ΔC9) (FIG. 107) and treated with half-log dilution of either rapamycin or rimiducid. Cells underwent either a caspase activation assay in the presence of caspase 3/7 green reagent and monitored by IncuCyte or alternatively, Rapamycin-mediated cell death was measured indirectly by a secreted alkaline phosphatase (SEAP) assay using a constitutive SRα-SEAP reporter. Functionally, the rapamycin inducible and the rimiducid inducible chimeric Caspase-9 polypeptides appear to induce caspase cleavage with similar kinetics and threshold when activated by their respective suicide drugs (FIG. 107A). In contrast, data obtained from the SEAP assay demonstrates that the rimiducid-inducible switch in the iC9 chimeric caspase polypeptide is more sensitive to activation at low rimiducid concentrations compared with the rapamycin-inducible caspase-9 switches (iRC9) at low rapamycin concentrations (FIG. 107B). The rapamycin inducible chimeric Caspase-9 polypeptide, iRC9, is highly active even in the presence of as little as 100 pM rapamycin, with some efficacy at even lower drug levels, albeit with slower kinetics. When comparing the two iRC9 polypeptides, FRB.FKBP.ΔC9 versus FKBP.FRB.ΔC9, FRB.FKBP.ΔC9 is active at lower rapamycin concentration than FKBP.FRB.ΔC9, consistent with data obtained in FIG. 106B. Finally, the iRC9 chimeric Caspase-9 polypeptide is insensitive to rimiducid below 100 nM making it feasible to combine this rapamycin-induced off-switch with another rimiducid-medicated switch (for example, iMC).

Chimeric iRmC9-Expressing T Cells can be Activated by Both Rimiducid and Rapamycin In Vitro.

[0888] The iRmC9 (FRB.F_{V}.ΔC9 (pBP1327) and F_{V}.FRB.ΔC9 (pBP1328)) were generated by mutating the FKBP domain within iRC9 to F36V to accommodate rimiducid binding. A SRα-SEAP assay was performed to assess the drug specificity of the 3 off-switches: iC9 (pBP220), iRC9s (pBP1310 & 1311), and iRmC9 (pBP1327 & pBP1328). The plasmid pBP1501 contains only the ΔC9 domain and serves as a negative control for drug induction (FIG. 106A). Rimiducid can activate both iC9 and iRmC9 switches but requires >100 nM ligand to activate the iRC9 switch (FIG. 108A). Conversely, rapamycin can activate both iRC9 and iRmC9 switches but is not able to induce dimerization of iC9 even at 1000 nM concentration.

[0889] To determine the functionality of these switches in activated T cells, retroviral supernatants were produced and transduced into PBMCs activated from 3 separate donors. T cells expressing the different caspase-9 switches were subjected to a killing assay with increasing doses of rimiducid and rapamycin in the presence of caspase 3/7 green reagent and monitored by IncuCyte (FIG. 108B). As observed by SRα-SEAP assay, rimiducid can activate iC9 and iRmC9 but not iRC9, which comprises the wild type FKBP12, while rapamycin is able to activate iRC9 and iRmC9, but not iC9. Negative control ΔC9 alone (pBP1501) was not active in the presence of either rimiducid or rapamycin. Of note, rimiducid activates FRB.F_{V}.ΔC9 (pBP1327) with greater efficiency than F_{V}.FRB.ΔC9 (pBP1328), possibly due to the F_{V} domain being proximal to caspase-9. The protein level of the inducible caspases was determined by Western blot. iC9 is expressed at higher levels compared to both iRC9 and iRmC9 (FIG. 108C). Based on these data, the following plasmids were selected to proceed to further in vivo testing: iC9 (pBP0220), iRC9 (pBP1310), and iRmC9 (pBP1327).

iRmC9 T Cells can be Activated by Both Rimiducid and Rapamycin In Vivo.

[0890] PBMCs from donor 676 were activated and co-transduced with one of the off-switches and GFP-Fluc retroviruses. Eleven days after transduction, cells were analyzed for transduction efficiency with GFP and anti-CD3/anti-CD19 antibodies (FIG. 109A). This analysis showed that iC9 T cells were 41% GFP⁺/CD19⁺, iRC9 T cells were 65% GFP⁺/CD19⁺ and iRmC9 T cells were 51% GFP⁺/CD19⁺. The CD19⁺ MFI for the different T cell populations were: iC9=15.07, iRC9=14.38, and iRmC9=13.39. The cells were collected, counted, washed, and resuspended at 1×10⁶ cells in 100 μl PBS for each tail vein mouse injection (Table 10) (time=−18 hr). The next day, 5 mg/kg rimiducid (dissolved in solutol and PBS) or 10 mg/kg rapamycin (dissolved in detergent-based excipient “PT”) 10% PEG-400+17% Tween-80) were injected intraperitoneally into each respective group (time=0 hr). IVIS imaging was performed at −14, 0, 5, 24 and 29 hours. Mice were sacrificed and spleens were collected for FACS analysis with hCD3, hCD19 and mCD45 antibodies. Rimiducid administration induced significant removal of 109 and iRmC9 T cells while rapamycin induced removal of iRC9 and iRmC9 T cells (FIGS. 109B & C). The relatively high level of BLI signal detected in the iC9 group treated with rimiducid may be attributed to the high single GFP⁺ population (41%) in the transduced T cells (FIG. 109A). Interestingly, in the iC9-expressing T cell group treated with rapamycin, IVIS imaging shows higher signal compared to the respective no drug group, suggesting that the rapamycin vehicle that is composed of the PT might boost the bioluminescence detected. Analysis of splenocytes revealed that ˜20% of iC9 T cells remained after rimiducid treatment compared to those in treated with no drug- or rapamycin-treated groups (FIG. 109D). Similarly, at 24 hours, approximately ˜25% of iRC9 T cells remained following rapamycin treatment compared to those in the no drug- and rimiducid-treated groups. In the iRmC9 group, ˜50% and ˜40% of the iRmC9 T cells remained following rimiducid or rapamcyin administration, respectively. The higher percentage of remaining iRmC9 T cells observed may be due to an artifact of normalizing the no drug group. In the graph that plots the CD19⁺ MFI of splenocytes (FIG. 109D, right graph), iRmC9 T cells had lower CD19⁺ MFI as seen before injection compared to the other groups, and the T cells that remained in the spleens post-drug treatment had similar CD19⁺ MFIs to the iC9 and iRC9-treated groups.

Drug Titration of Rimiducid and Rapamycin in Mice Bearing iRmC9 T Cells.

[0891] The iRmC9 construct represents an ideal switch that can allow for direct comparison of rimiducid versus rapamycin-induced killing kinetics in the same molecule. In this experiment, iRmC9 T cells were produced by co-transduction with pBP1327 and GFP-Fluc retroviruses from donor 584. Ten days post-transduction, FACS analysis indicated that 73% of the cells were GFP⁻/CD19⁺ and the CD19⁺ MFI was 15.23 (FIG. 110A). Ten million iRmC9 T cells were injected IV per mouse (Table 10) (time=−14 hr). The next day, rimiducid (dissolved in solutol and PBS) or rapamycin (dissolved in PT) were injected intraperitoneally into each respective group (time=0 hr). Vehicle groups received either PBS, 25% solutol in PBS or 5% DMA in PT. IVIS imaging was performed at −10, 0, 6, and 24 hours. Mice were sacrificed and spleens were collected for FACS analysis with hCD3, hCD19 and mCD45 antibodies. IVIS imaging for the rimiducid dose titration shows dose-dependent removal of iRmC9 T cells (FIGS. 110B & C). In contrast, IVIS imaging in the rapamycin-dosed groups shows an unexpected increase in IVIS signal detected that is most pronounced in the vehicle-treated group, but is not observed in the PBS-treated group (FIG. 110B). This observation is similar to that observed in the previous experiment (FIG. 109B) and could be due to the components of the PT. Splenocyte analysis however showed a similar dose-response with regards to deletion of iRmC9-modified T cells by rimiducid or rapamycin (FIG. 110D).

[0892] FIG. 106. Topology of FRB and FKBP in iRC9. (FIG. 106A) PBMCs from donor 920 were activated and transduced with pBP1310 and pBP1311 vectors. (FIG. 106B) Five days post-transduction, T cells were seeded on 96-well plates with 0, 0.8, 4 and 20 nM rapamycin. Additionally, 2 μM caspase 3/7 green reagent was added to monitor caspase cleavage by the IncuCyte. Line graphs depict caspase activation over 24 hours post-rapamycin treatment of FRB.FKBP.ΔC9 versus FKBP.FRB.ΔC9. (FIG. 106C) Protein expression of the iRC9 T cells was analyzed by Western blot using antibodies to hCaspase-9 and β-actin.

[0893] FIG. 107. High (>100 nM) rimiducid concentration is required to activate iRC9. 293 cells were seeded at 300,000 cells/well in a 6-well plate and allowed to grow for 2 days. After 48 h, cells were transfected with 1 μg of experimental plasmids. Cells were harvested 48 h after transfection and diluted 2.5× their original volume. (FIG. 107A) For the Incucyte/casp3/7 assay, 50 μl of cells were plated per well including either rimiducid or rapamycin drug and caspase 3/7 green reagent (2.5 μM final concentration). (FIG. 107B) For the SEAP assays, 100 μl of cells were plated in a 96-well plate with (half-log) rimiducid (or rapamycin) drug dilutions and ˜18 h after drug exposure, plates were heat-inactivated before substrate (4-MUP) addition.

[0894] FIG. 108. iRmC9 T cells can be activated by both rimiducid and rapamycin in vitro. (FIG. 108A) The SRα SEAP assay was performed by co-transfecting 293 cells with the pBP1501, 220, 1310, 1311, 1327, 1328 vectors and the SRα-SEAP reporter plasmid. (FIG. 108B) For the Incucyte/casp3/7 assay, T cells were seeded on 96-well plates with increasing rimiducid and rapamycin concentrations in the presence of 2 μM caspase 3/7 green reagent to monitor caspase cleavage by the IncuCyte. (FIG. 108C) Protein expression of the iRC9 T cells was analyzed by Western blot using antibodies to hCaspase-9 and β-actin.

[0895] FIG. 109. iRmC9 T cells can be activated by both rimiducid and rapamycin in vivo. PBMCs from donor 676 were activated and co-transduced with retroviruses encoding the pBP0220, 1310, 1327 vectors and the GFP-Fluc plasmid. (FIG. 109A) Eleven days post transduction, the cells were analyzed for CD19 and GFP transduction efficiency prior to injection into mice. (FIGS. 109B & C) NSG mice were injected i.v. with 107 T cells co-transduced with GFP-Fluc per mouse and suicide drugs were injected i.p. the next day. Bioluminescence of cells was assessed at −14, 0, 5, 24, and 29 hours post-drug administration. (FIG. 109D) At 29-h post-drug treatment, mice were euthanized and spleens were collected for flow cytometry analysis with antibodies to hCD3, hCD34, and mCD45

[0896] FIG. 110. Drug titration of rimiducid and rapamycin in mice bearing iRmC9 T cells. PBMCs from donor 584 were activated and co-transduced with retroviruses encoding the pBP1327 vector and the GFP-Fluc plasmid. (FIG. 110A) Ten days post-transduction, the cells were analyzed for CD19 and GFP transduction efficiency prior to injection into mice. (FIGS. 110B & C) NSG mice were injected i.v. with 1×107 T cells co-transduced with GFP-Fluc per mouse and suicide drugs were injected i.p. the next day. Bioluminescence of cells was assessed at −10, 0, 6, and 24 hours post drug administration. (FIG. 110D) At 24 h post-drug treatment, mice were euthanized and spleens were collected for flow cytometry analysis with antibodies to hCD3, hCD34, and mCD45.

TABLE 9
Comparing the apoptotic activation
of iC9, iRC9, and iRmC9 in vivo.

| Group # | T cells (GFP-Fluc) | Suicide drug | # of mice |
|---|---|---|---|
| 1 | 220 | No treatment | 3 |
| 2 | 220 | 5 mg/kg rimiducid | 5 |
| 3 | 220 | 10 mg/kg rapamycin | 3 |
| 4 | 1310 | No treatment | 3 |
| 5 | 1310 | 5 mg/kg rimiducid | 3 |
| 6 | 1310 | 10 mg/kg rapamycin | 5 |
| 7 | 1327 | No treatment | 3 |
| 8 | 1327 | 5 mg/kg rimiducid | 5 |
| 9 | 1327 | 10 mg/kg rapamycin | 5 |
| Total # of mice | | | 35 |

TABLE 10
Drug titration of rimiducid and rapamycin in mice bearing iRmC9

| | T cells | Rimiducid | Rapamycin | # of |
|---|---|---|---|---|
| Group # | (GFP-Fluc) | (mg/kg) | (mg/kg) | mice |
| 1 | 1327 | 0 | 0 | 3 |
| | (+Saline) | | | |
| 2 | 1327 | 25% Solutol | 0 | 3 |
| | | in Saline | | |
| 3 | 1327 | 0 | 5% DMA in PT | 3 |
| 4 | 1327 | 5* | 0 | 3 |
| 5 | 1327 | 0.5* | 0 | 4 |
| 6 | 1327 | 0.05* | 0 | 4 |
| 7 | 1327 | 0.005 | 0 | 4 |
| 8 | 1327 | 0.0005 | 0 | 4 |
| 9 | 1327 | 0.00005 | 0 | 4 |
| 10 | 1327 | 0 | 10+ | 3 |
| 11 | 1327 | 0 | 1+ | 4 |
| 12 | 1327 | 0 | 0.1+ | 4 |
| 13 | 1327 | 0 | 0.01+ | 4 |
| 14 | 1327 | 0 | 0.001+ | 4 |
| 15 | 1327 | 0 | 0.0001+ | 4 |
| Total # of mice | | | | 55 |

*solutol placebo added to control for 25% solutol in saline
+DMA controlled to 5% DMA in PT.

### Summary

[0897] The kinetics and efficiency of apoptosis induction following dimerizer ligand administration between three different caspase-9-enabled safety switches were compared. In general, the capacity of apoptotic induction is similar between iC9, iRC9, and iRmC9 off-switches when triggered with their respective drug(s), but there are some nuances with regards to kinetics and dose-response. Thus, these three safety-switch designs expand the toolbox of molecules that can be used for current and future clinical applications where there is a critical need for an off mechanism.

[0898] Because rapamycin and rimiducid are predicted to have different pharmacodynamic properties, one potential application for this technology could be in the choice of a ligand that can provide tissue selectivity. For example, should rimiducid be excluded from the brain due to the impermeability of the blood brain barrier, a iRmC9 switch could be activated by rapamycin. Alternatively, if titration of T cell numbers is required, the dose-response curve of one drug over another could be an important determinant of the decision of which to deploy. Moreover, if oral delivery is needed, rapamycin or analogs may be the logical choice.

### Example 31: Inducible MyD88-CD40 Costimulation Provides Ligand-Dependent Tumor Eradication by CD123-Specific Chimeric Antigen Receptor T Cells

[0899] Provided is an example of the use of one of the two molecular switches, iMC, in the context of costimulation of CD123-specific chimeric antigen receptor expressing T cells. Promising clinical results with CD19-specific chimeric antigen receptor (CAR)-directed T cells for the treatment of B cell leukemia and lymphoma suggest that CARs may be effective in other hematological malignancies, such as acute myeloid leukemia (AML).

[0900] CD123/IL-3Rα is an attractive CAR-T cell target due to its high expression on both AML blasts and leukemic stem cells (AML-LSCs). However, the antigen is also expressed at lower levels on normal stem cell progenitors presenting a major toxicity concern should CD123-specific CAR-T cells show long-term persistence.

[0901] The iMC-CAR costimulation platform iMC uses a proliferation-deficient, first generation, CD123-specific CAR together with a ligand (rimiducid (Rim))-dependent costimulatory switch (inducible MyD88/CD40 (iMC)) to provide physician-controlled eradication of CD123⁺ tumor cells and regulate long-term CAR-T cell engraftment.

[0902] Retrovirus and transduction: T cells were activated with anti-CD3/28 antibodies and subsequently transduced with a bicistronic retrovirus encoding tandem Rim-binding domains (FKBP12v36), cloned in-frame with MyD88 and CD40 cytoplasmic signaling molecules, and first generation CAR targeting CD123 (SFG-iMC-CD123.) (FIG. 111).

[0903] Coculture assay: The effects of iMC costimulation on CD123-targeted CARs were assessed in coculture assays with CD123+, EGFPluciferase (EGFPluc)-modified leukemic cell lines (KG1, THP-1 and MOLM-13) with and without Rim using the IncuCyte live cell imaging system. IL-2 production was examined by ELISA from coculture supernatants.

[0904] Animal experiments: In vivo efficacy of iMC-CD123.ζ-modified T cells was assessed using an immune-deficient NSG tumor xenograft model. One million EGFPluc-expressing CD123⁺ THP-1 tumor cells were injected i.v. into the animals, followed by a single i.v. injection on day 7 with varying non-transduced or iMC-CD123.ζ-modified T cells. Groups receiving CAR-T cells subsequently received i.p. injections of Rim (1 mg/kg) or vehicle only on days 0 and 15 post-T cell injection. Animals were evaluated for THP-1-EGFPluc tumor burden and weight change on a weekly basis using IVIS bioluminescent imaging (BLI) and for T cell persistence by flow cytometry and qPCR at day 30 post-T cell injection.

[0905] FIG. 112: PBMCs from 2 donors were activated and transduced with retrovirus encoding the CD123 iMC+CARζ-T vector. Six days post-transduction, T cells were seeded onto 96-well plates at 1:10 E:T ratios with THP1-GFP.Fluc cells or HPAC-RFP cells in the presence of 0, 0.1, or 1 nM rimiducid and placed in the IncuCyte to monitor the kinetics THP1-GFP.Fluc or HPAC-RFP growth. (A & B) Two days post-seeding, culture supernatants from a duplicate plate were analyzed for IL-6 and IL-2 production by ELISA. (C) Total green fluorescence intensity of THP1-GFP.Fluc and (D) number of HPAC-RFP cells per well were analyzed using the basic analyzer software for the IncuCyte at day 7.

[0906] FIG. 113. PBMCs from 4 donors were activated and co-transduced with retroviruses encoding the CD123 iMC+CARζ-T and RFP vectors. Ten days post-transduction, T cells were seeded onto 96-well plates at 1:1 E:T ratios with THP1-GFP.Fluc cells in the presence of 0 or 1 nM rimiducid and placed in the IncuCyte to monitor the kinetics THP1-GFP.Fluc and T cell-RFP growth. (A) Two days post-seeding, culture supernatants from a duplicate plate were analyzed for IL-2 production by ELISA. (B) On day 7, cells were analyzed for the number of THP1-GFP.Fluc and (C) T cell-RFP remained in the coculture by flow cytometry. (D) Time course monitor of THP1-GFP.Fluc green fluorescence and (E) T cell-RFP red fluorescence analyzed using the IncuCyte for a total of 7 days.

[0907] FIG. 114. (A) PBMCs were activated and transduced with retrovirus including the CD123 iMC-CARζ vector. Twelve days after transduction, CAR expression was determined using anti-Q-bend-10 antibody before injection into mice. (B) NSG mice were engrafted with 1×10⁶ THP1-GFP.Fluc cells i.v. for 7 days followed by infusion of 2.5×106 non-transduced (NT) or CD123 iMC-CAR cells i.v. Rimiducid or placebo were given i.p. on days 0 and 15 after T cell infusion at 1 mg/kg. (C) THP1-GFP.Fluc growth was measured using IVIS bioluminescence. (D, E) On day 30, mice were sacrificed and spleens were analyzed for the presence of CAR-T cells by flow cytometry and vector copy number assay.

[0908] FIG. 115: (A) NSG mice were engrafted with 1×106 THP1-GFP.Fluc cells i.v. for 7 days followed by treatment with 10e6 NT T cells or various doses of CD123 iMC+CARζ-T cells i.v. Rimiducid or placebo were given i.p. on days 0 and 15 after T cell infusion at 1 mg/kg. (B) On day 29, mice were sacrificed and spleens were analyzed for the presence of CAR-T cells by vector copy number assay.

[0909] An iMC-CARζplatform comprising a ligand-dependent activation switch and a proliferation-deficient first generation CAR, efficiently eradicated CD123⁺ leukemic cells when costimulation is provided by systemic rimiducid administration. Deprivation of iMC costimulation resulted in reduction of CAR-T levels, providing a user-controlled system for managing persistence and safety of CD123-specific CAR-T cells.

### Example 32: Inducible MyD88/CD40 Enhances Proliferation and Survival of Tumor-Specific TCR-Modified T Cells and Improves Anti-Tumor Efficacy in Myeloma

[0910] Provided is an example of the use of one of the two molecular switches, iMC, in the context of tumor-specific recombinant TCR-expressing T cells.

[0911] Cancer immunotherapy using T cells engineered to express tumor antigen-specific TCRs has shown promise in the clinic; however, durable responses have been limited by poor T cell expansion and persistence in vivo. In addition, downregulation of MHC class I on tumor cells diminishes T cell recognition, leading to reduced therapeutic efficacy.

[0912] Inducible MyD88/CD40 (iMC) is a rimiducid (AP1903)-dependent costimulatory molecule that enhances DC activation1 and T cell proliferation and survival. PRAME (Preferentially expressed Antigen in MElanoma) is a cancer testis (CT) antigen that is overexpressed in a number of cancers, including melanoma, sarcoma, AML, CML, neuroblastoma, breast, lung, head and neck cancers, but not in normal tissues. Bob1 (also known as OCA-B, OBF1 or POU2AF1) is a B cell-specific transcriptional co-activator that is highly expressed in CD19⁺ B cells, ALL, CLL, MCL and multiple myeloma (MM).

[0913] FIG. 116 is a schematic of a “Costimulation on demand” system, controlled using an inducible costimulatory polypeptide (iMC) to better regulate potent T cell therapy. T cell activation and proliferation is TCR- and iMC-dependent. Maximal tumor-directed cytotoxicity, as well as T cell persistence in vivo, requires synergistic signals from a tumor-specific TCR and rimiducid-activated iMC.

[0914] FIG. 117: (A-C) Retroviral vectors expressing PRAME TCR (Amir, et al.), or a vector encoding a PRAME TCR, an iMC polypeptide, and a surface marker, (D) PRAME TCR recognition of SLL-peptide pulsed T2 cells synergizes with rimiducid-dependent iMC signals for maximal IL-2 secretion.

[0915] FIG. 118: (A) Trans-well assay set-up. (B) Cytokines secreted by transduced T cells in the top well upregulate HLA class I on the surface of SK-N-SH neuroblastoma cells in an antigen-independent, but iMC- and rimiducid-dependent manner.

[0916] FIG. 119(A) iMC-PRAME TCR-mediated cytotoxicity against HLA-A2⁺PRAME⁺ U2OS osteosarcoma is rimiducid-independent (B) Signals from the PRAME TCR synergize with rimiducid-driven iMC costimulation, resulting in maximal IL-2 secretion. The Go156 TCR is a negative control TCR.

[0917] FIG. 120: (A) iMC-Bob-1 TCR-mediated cytotoxicity against HLA-B7⁺Bob-1⁺ U266 multiple myeloma is rimiducid-independent. (B) Signals from the Bob-1 TCR synergize with rimiducid-driven iMC costimulation, resulting in maximal IL-2 secretion. Go156 TCR is a negative control TCR.

[0918] FIG. 121: (A) NSG mice were engrafted with 1×10⁶ luciferase-expressing U266 myeloma cells and treated with 1×107 non-transduced, PRAME TCR- or iMC-PRAME TCR-transduced T cells on day 13. Starting on day 14, five of the mice that received iMC-PRAME-transduced T cells received 5 mg/kg rimiducid i.p. weekly until day 38. (B) Tumor growth was measured by bioluminescence imaging. (C,D) Mice were sacrificed on day 94 and the spleens were analyzed for persistence of human T cells. iMC costimulation significantly increased the number of Vβ1⁺CD8⁺ T cells (C) but not the number of Vβ1⁺CD4⁺ T cells (D).

[0919] Rimiducid-driven iMC activation provides potent costimulatory signals in transduced T cells, synergizing with signals from exogenous PRAME- or Bob1-specific TCRs, leading to enhanced T cell proliferation/survival and improved anti-tumor efficacy both in vitro and in vivo.

[0920] iMC activation upregulates HLA class I levels on tumor targets, which should lead to improved cytotoxicity via both engineered and endogenous T cells.

### REFERENCES

[0921] Narayanan P et al., A composite MyD88/CD40 switch synergistically activates mouse and human dendritic cells for enhanced antitumor efficacy. J Clin Invest. (2011) 121:1524.
[0922] Amir A L et al., PRAME-specific Allo-HLA-restricted T cells with potent antitumor reactivity useful for therapeutic T-cell receptor gene transfer. Clin Cancer Res (2011) 17:5615.

### Example 33: Representative Embodiments

[0923] Provided hereafter are examples of certain embodiments of the technology.
[0924] A1. A nucleic acid comprising a promoter operably linked to a first polynucleotide coding for a first chimeric polypeptide, wherein:
   [0925] the first chimeric polypeptide comprises a first multimerizing region that binds to a first ligand;
   [0926] the first multimerizing region comprises a first ligand binding unit and a second ligand binding unit;
   [0927] the first ligand is a multimeric ligand comprising a first portion and a second portion;
   [0928] the first ligand binding unit binds to the first portion of the first ligand and does not bind significantly to the second portion of the first ligand; and
   [0929] the second ligand binding unit binds to the second portion of the first ligand and does not bind significantly to the first portion of the first ligand.
      A2. The nucleic acid of embodiment A1, wherein the first chimeric polypeptide comprises a pro-apoptotic polypeptide region.
      A2.1. The nucleic acid of embodiment A2, wherein the first multimerizing region is amino terminal to the pro-apoptotic polypeptide region.
      A2.2. The nucleic acid of embodiment A2, wherein the first multimerizing region is carboxyl terminal to the pro-apoptotic polypeptide region.
      A3. The nucleic acid of embodiment A1, wherein the first chimeric polypeptide comprises
   [0930] a) a MyD88 polypeptide region or a truncated MyD88 polypeptide region lacking the TIR domain; and
   [0931] b) a CD40 cytoplasmic polypeptide region lacking the CD40 extracellular domain.
      A4. The nucleic acid of any one of embodiments A1-A3, comprising a second polynucleotide coding for a second chimeric polypeptide, wherein:
   [0932] the promoter is operably linked to the second polynucleotide;
   [0933] the second chimeric polypeptide comprises a second multimerizing region that binds to a second ligand;
   [0934] the second multimerizing region comprises a third ligand binding unit;
   [0935] the second ligand is a multimeric ligand comprising a third portion; and
   [0936] the third ligand binding unit binds to the third portion of the second ligand and does not bind significantly to the second portion of the first ligand.
      A5. The nucleic acid of embodiment A4, wherein the first portion of the first ligand and the third portion of the second ligand are the same.
      A6. The nucleic acid of embodiment A4, wherein the first portion of the first ligand and the third portion of the second ligand are different.
      A7. The nucleic acid of embodiment A4, wherein the first ligand binding unit of the first multimerizing region and the third ligand binding unit of the second multimerizing region are the same.
      A8. The nucleic acid of embodiment A4, wherein the first ligand binding unit of the first multimerizing region and the third ligand binding unit of the second multimerizing region are different.
      A9. The nucleic acid of any one of embodiments A4-A8, wherein the second chimeric polypeptide comprises a pro-apoptotic polypeptide region and the first chimeric polypeptide does not comprise the pro-apoptotic polypeptide region.
      A10. The nucleic acid of embodiment A9, wherein the second chimeric polypeptide comprises
   [0937] a) a MyD88 polypeptide region or a truncated MyD88 polypeptide region lacking the TIR domain; and
   [0938] b) a CD40 cytoplasmic polypeptide region lacking the CD40 extracellular domain
   [0939] wherein the second multimerizing region of the second chimeric polypeptide comprises at least two third binding units.
      A11. The nucleic acid of any one of embodiments A1-A8, wherein the second chimeric polypeptide comprises an MC polypeptide, wherein the MC polypeptide comprises
   [0940] a) a MyD88 polypeptide region or a truncated MyD88 polypeptide region lacking the TIR domain; and
   [0941] b) a CD40 cytoplasmic polypeptide region lacking the CD40 extracellular domain and the first chimeric polypeptide does not comprise the MC polypeptide.
      A12. The nucleic acid of embodiment A11, wherein the second chimeric polypeptide comprises a pro-apoptotic polypeptide region.
      A13. The nucleic acid of any one of embodiments A1-A12, wherein the first ligand binding unit is FKBP12 or an FKBP12 variant.
      A14. The nucleic acid of embodiment A13, wherein the first ligand binding unit is FKBP12.
      A15. The nucleic acid of any one of embodiments A1-A14, wherein the second ligand binding unit is FRB or an FRB variant.
      A16. The nucleic acid of embodiment A15, wherein the second ligand binding unit is FRB_{L}.
      A17. The nucleic acid of any one of embodiments A1-A16, wherein the third ligand binding unit is FKBPv36.
      A18. The nucleic acid of embodiment A17, wherein the first ligand binding unit is not FKBPv36.
      A19. The nucleic acid of any one of embodiments A1-A18, wherein the first ligand is rapamycin or a rapalog.
      A20. The nucleic acid of any one of embodiments A1-A19, wherein the second ligand is AP1903.
      A21. The nucleic acid of any one of embodiments A1-A20, wherein the third ligand binding unit binds to the third portion of the second ligand with 100× more affinity than the first ligand binding unit binds to the third portion of the second ligand.
      A22. The nucleic acid of embodiment any one of embodiments A1-A20, wherein the third ligand binding unit binds to the third portion of the second ligand with 500× more affinity than the first ligand binding unit binds to the third portion of the second ligand.
      A23. The nucleic acid of any one of embodiments A1-A20, wherein the third ligand binding unit binds to the third portion of the second ligand with 1000× more affinity than the first ligand binding unit binds to the third portion of the second ligand.
      A24. The nucleic acid of any one of embodiments A1-A23, further comprising a polynucleotide that encodes a chimeric antigen receptor.
      A25. The nucleic acid of embodiment A24, wherein the chimeric antigen receptor comprises (i) a transmembrane region, (ii) a T cell activation molecule, and (iii) an antigen recognition moiety.
      A26. The nucleic acid of any one of embodiments A1-A23, further comprising a polynucleotide that encodes a chimeric T cell receptor.
      A27. A modified cell comprising a nucleic acid of any one of embodiments A1-A26.
      A28. A modified cell, comprising a first polynucleotide coding for a first chimeric polypeptide, wherein:
      the first chimeric polypeptide comprises a first multimerizing region that binds to a first ligand;
      the first multimerizing region comprises a first ligand binding unit and a second ligand binding unit;
      the first ligand is a multimeric ligand comprising a first portion and a second portion;
      the first ligand binding unit binds to the first portion of the first ligand and does not bind significantly to the second portion of the first ligand; and
      the second ligand binding unit binds to the second portion of the first ligand and does not bind significantly to the first portion of the first ligand.
      A29. The modified cell of embodiment A28, wherein the first chimeric polypeptide comprises a pro-apoptotic polypeptide region.
      A30. The modified cell of embodiment A28, wherein the first chimeric polypeptide comprises
      a) a MyD88 polypeptide region or a truncated MyD88 polypeptide region lacking the TIR domain; and
      b) a CD40 cytoplasmic polypeptide region lacking the CD40 extracellular domain.
      A31. The modified cell of any one of embodiments A28-A30, comprising a second polynucleotide coding for a second chimeric polypeptide, wherein:
   [0942] the second chimeric polypeptide comprises a second multimerizing region that binds to a second ligand;
      the second multimerizing region comprises a third ligand binding unit;
      the second ligand is a multimeric ligand comprising a third portion; and
      the third ligand binding unit binds to the third portion of the second ligand and does not bind significantly to the second portion of the first ligand.
      A32. The modified cell of embodiment A31, wherein the first portion of the first ligand and the third portion of the second ligand are the same.
      A33. The modified cell of embodiment A31, wherein the first portion of the first ligand and the third portion of the second ligand are different.
      A34. The modified cel of embodiment A31, wherein the first ligand binding unit of the first multimerizing region and the third ligand binding unit of the second multimerizing region are the same.
      A35. The modified cell of embodiment A31, wherein the first ligand binding unit of the first multimerizing region and the third ligand binding unit of the second multimerizing region are different.
      A36. The modified cell of any one of embodiments A31-A35, wherein the second chimeric polypeptide comprises a pro-apoptotic polypeptide region and the first chimeric polypeptide does not comprise the pro-apoptotic polypeptide region.
      A37. The modified cell of embodiment A36, wherein the second chimeric polypeptide comprises
   [0943] a) a MyD88 polypeptide region or a truncated MyD88 polypeptide region lacking the TIR domain; and
   [0944] b) a CD40 cytoplasmic polypeptide region lacking the CD40 extracellular domain
   [0945] wherein the second multimerizing region of the second chimeric polypeptide comprises at least two third binding units.
      A38. The modified cell of any one of embodiments A28-A35, wherein the second chimeric polypeptide comprises an MC polypeptide, wherein the MC polypeptide comprises
   [0946] a) a MyD88 polypeptide region or a truncated MyD88 polypeptide region lacking the TIR domain; and
   [0947] b) a CD40 cytoplasmic polypeptide region lacking the CD40 extracellular domain and the first chimeric polypeptide does not comprise the MC polypeptide.
      A39. The modified cell of embodiment A38, wherein the second chimeric polypeptide comprises a pro-apoptotic polypeptide region.
      A40. The modified cell of any one of embodiments A28-A39, wherein the first ligand binding unit is FKBP12 or an FKBP12 variant.
      A41. The modified cell of embodiment A40, wherein the first ligand binding unit is FKBP12.
      A42. The modified cell of any one of embodiments A28-A41, wherein the second ligand binding unit is FRB or an FRB variant.
      A43. The modified cell of embodiment A42, wherein the second ligand binding unit is FRB_{L}.
      A44. The modified cell of any one of embodiments A28-A43, wherein the third ligand binding unit is FKBPv36.
      A45. The modified cell of embodiment A44, wherein the first ligand binding unit is not FKBPv36.
      A46. The modified cell of any one of embodiments A28-A45, wherein the first ligand is rapamycin or a rapalog.
      A47. The modified cell of any one of embodiments A28-A46, wherein the second ligand is AP1903.
      A48. The modified cell of any one of embodiments A28-A47, wherein the third ligand binding unit binds to the third portion of the second ligand with 100× more affinity than the first ligand binding unit binds to the third portion of the second ligand.
      A49. The modified cell of embodiment any one of embodiments A28-A47, wherein the third ligand binding unit binds to the third portion of the second ligand with 500× more affinity than the first ligand binding unit binds to the third portion of the second ligand.
      A50. The modified cell of any one of embodiments A28-A47, wherein the third ligand binding unit binds to the third portion of the second ligand with 1000× more affinity than the first ligand binding unit binds to the third portion of the second ligand.
      A51. The modified cell of any one of embodiments A28-A50, further comprising a polynucleotide that encodes a chimeric antigen receptor.
      A52. The modified cell of embodiment A51, wherein the chimeric antigen receptor comprises (i) a transmembrane region, (ii) a T cell activation molecule, and (iii) an antigen recognition moiety.
      A53. The modified cell of any one of embodiments A28-A50, further comprising a polynucleotide that encodes a chimeric T cell receptor.
      A54. A modified cell, comprising
   [0948] a) a first chimeric polypeptide, wherein:
      the first chimeric polypeptide comprises a first multimerizing region that binds to a first ligand;
      the first multimerizing region comprises a first ligand binding unit and a second ligand binding unit;
      the first ligand is a multimeric ligand comprising a first portion and a second portion;
      the first ligand binding unit binds to the first portion of the first ligand and does not bind significantly to the second portion of the first ligand; and
      the second ligand binding unit binds to the second portion of the first ligand and does not bind significantly to the first portion of the first ligand; and
   [0949] b) a second chimeric polypeptide, wherein:
      [0950] the second chimeric polypeptide comprises a second multimerizing region that binds to a second ligand;
         the second multimerizing region comprises a third ligand binding unit;
         the second ligand is a multimeric ligand comprising a third portion; and
         the third ligand binding unit binds to the third portion of the second ligand and does not bind significantly to the second portion of the first ligand.
         A55. The modified cell of embodiment A54, comprising a first polynucleotide that encodes the first chimeric polypeptide and a second polynucleotide that encodes the second chimeric polypeptide.
         A56. The modified cell of any one of embodiments A28-A55, comprising the first ligand or the second ligand.
         A57. A kit or composition comprising nucleic acid comprising a first polynucleotide and a second polynucleotide, wherein
   [0951] a) the a first polynucleotide encodes a first chimeric polypeptide, wherein:
      the first chimeric polypeptide comprises a first multimerizing region that binds to a first ligand;
      the first multimerizing region comprises a first ligand binding unit and a second ligand binding unit;
      the first ligand is a multimeric ligand comprising a first portion and a second portion;
      the first ligand binding unit binds to the first portion of the first ligand and does not bind significantly to the second portion of the first ligand; and
      the second ligand binding unit binds to the second portion of the first ligand and does not bind significantly to the first portion of the first ligand; and
   [0952] b) the second polynucleotide encodes a second chimeric polypeptide, wherein the a second chimeric polypeptide, wherein: the second chimeric polypeptide comprises a second multimerizing region that binds to a second ligand;
      the second multimerizing region comprises a third ligand binding unit;
      the second ligand is a multimeric ligand comprising a third portion; and
      the third ligand binding unit binds to the third portion of the second ligand and does not bind significantly to the second portion of the first ligand.
      1. A nucleic acid comprising a promoter operably linked to a polynucleotide coding for a chimeric pro-apoptotic polypeptide, wherein the chimeric pro-apoptotic polypeptide comprises
   [0953] a) a pro-apoptotic polypeptide region;
   [0954] b) a FRB or FRB variant region; and
   [0955] c) a FKBP12 polypeptide region.
      2. The nucleic acid of embodiment 1, wherein the order of regions (a), (b), and (c), from the amino terminus to the carboxyl terminus of the chimeric pro-apoptotic polypeptide is (c), (b), (a).
      3. The nucleic acid of embodiment 1, wherein the order of regions (a), (b), and (c), from the amino terminus to the carboxyl terminus of the chimeric pro-apoptotic polypeptide is (b), (c), (a).
      3.1. The nucleic acid of any one of embodiments 2 or 3, wherein (b) and (c) are amino terminal to the pro-apoptotic polypeptide.
      3.2. The nucleic acid of any one of embodiments 2 or 3, wherein (b) and (c) are carboxyl terminal to the pro-apoptotic polypeptide.
      4. The nucleic acid of any one of embodiments 1 to 3.2, wherein the chimeric pro-apoptotic polypeptide further comprises linker polypeptides between regions (a), (b), and (c).
      5. The nucleic acid of any one of embodiments 1-4, further comprising a polynucleotide coding for a marker polypeptide.
      6. A polypeptide encoded by a nucleic acid of any one of embodiments 1 to 5.
      7. A modified cell transfected or transduced with a nucleic acid of any one of embodiments 1 to 5.
      8. A nucleic acid comprising a promoter operably linked to
   [0956] a) a first polynucleotide encoding a chimeric pro-apoptotic polypeptide, wherein the chimeric pro-apoptotic polypeptide comprises
      [0957] (i) a pro-apoptotic polypeptide region;
      [0958] (ii) a FRB or FRB variant region; and
      [0959] (iii) a FKBP12 polypeptide region; and
   [0960] b) a second polynucleotide encoding a chimeric costimulating polypeptide, wherein the chimeric costimulating polypeptide comprises
      [0961] (i) two FKBP12 variant regions;
      [0962] (ii) a MyD88 polypeptide region or a truncated MyD88 polypeptide region lacking the TIR domain; and
      [0963] (iii) a CD40 cytoplasmic polypeptide region lacking the CD40 extracellular domain.
         8.5. A nucleic acid comprising a promoter operably linked to
   [0964] a) a first polynucleotide encoding a chimeric pro-apoptotic polypeptide, wherein the chimeric pro-apoptotic polypeptide comprises
      [0965] (i) a pro-apoptotic polypeptide region;
      [0966] (ii) a FRB or FRB variant region; and
      [0967] (iii) a FKBP12 polypeptide region; and
   [0968] b) a second polynucleotide encoding a chimeric costimulating polypeptide, wherein the chimeric costimulating polypeptide comprises
   [0969] (i) two FKBP12 variant regions; and
   [0970] (ii) a MyD88 polypeptide region or a truncated MyD88 polypeptide region lacking the TIR domain.
      9. The nucleic acid of any one of embodiments 8 or 8.5, wherein the FKBP12 variant regions bind to a ligand with at least 100 times more affinity than the ligand binds to the FKBP12 region.
      9.1. The nucleic acid of embodiment 8, wherein the FKBP12 variant regions bind to a ligand with at least 500 times more affinity than the ligand binds to the FKBP12 region.
      9.2. The nucleic acid of embodiment 8, wherein the FKBP12 variant regions bind to a ligand with at least 1000 times more affinity than the ligand binds to the FKBP12 region.
      10. The nucleic acid of embodiment 8, wherein the FKBP12 variant regions are FKBP12v36 regions.
      11. A nucleic acid comprising a promoter operably linked to
   [0971] a) a first polynucleotide encoding a chimeric pro-apoptotic polypeptide, wherein the chimeric pro-apoptotic polypeptide comprises
      [0972] (i) a pro-apoptotic polypeptide region;
      [0973] (ii) a FRB or FRB variant region; and
      [0974] (iii) a FKBP12 polypeptide region; and
   [0975] b) a second polynucleotide encoding a chimeric costimulating polypeptide, wherein the chimeric costimulating polypeptide comprises
   [0976] (i) two FKBP12 v36 regions;
   [0977] (ii) a MyD88 polypeptide region or a truncated MyD88 polypeptide region lacking the TIR domain; and
   [0978] (iii) a CD40 cytoplasmic polypeptide region lacking the CD40 extracellular domain.
      12. The nucleic acid of any one of embodiments 8-11, wherein the order of regions (i), (ii), and (iii), from the amino terminus to the carboxyl terminus of the chimeric pro-apoptotic polypeptide is (iii), (ii).
      13. The nucleic acid of any one of embodiments 8-11, wherein the order of regions (i), (ii), and (iii), from the amino terminus to the carboxyl terminus of the chimeric pro-apoptotic polypeptide is (ii), (iii).
      14. The nucleic acid of any one of embodiments 8 to 13, further comprising linker polypeptides between regions (a), (b), and (c) of the chimeric pro-apoptotic polypeptide.
      15. The nucleic acid of any one of embodiments 8-14, wherein the nucleic acid further comprises a polynucleotide encoding a linker polypeptide between the first and second polynucleotides, wherein the linker polypeptide separates the translation products of the first and second polynucleotides during or after translation.
      16. The nucleic acid of embodiment 15, wherein the linker polypeptide that separates the translation products of the first and second polynucleotides is a 2A polypeptide.
      17. The nucleic acid of any one of embodiments 8-16, wherein the promoter is operably linked to the first polynucleotide and the second polynucleotide.
      17.1. The nucleic acid of any one of embodiments 8-17, further comprising a polynucleotide coding for a marker polypeptide.
      18. The nucleic acid of any one of embodiments 1-5, or 8-17.1, wherein the promoter is developmentally regulated.
      19. The nucleic acid of any one of embodiments 1-5, or 8-17.1, wherein the promoter is tissue-specific.
      20. The nucleic acid of any one of embodiments 1-5, or 8-19, wherein the promoter is activated in activated T cells.
      21. The nucleic acid of any one of embodiments 8-20, further comprising a third polynucleotide coding for a chimeric antigen receptor.
      22. The nucleic acid of embodiment 21, wherein the chimeric antigen receptor comprises (i) a transmembrane region, (ii) a T cell activation molecule, and (iii) an antigen recognition moiety.
      23. The nucleic acid of any one of embodiments 8-20, further comprising a third polynucleotide coding for a chimeric T cell receptor.
      24. The nucleic acid of any one of embodiments 21-23, further comprising polynucleotides encoding linker polypeptides between the first, second, and third polynucleotides, wherein the linker polypeptide separates the translation products of the first, second, and third polynucleotides during or after translation.
      25. The nucleic acid of embodiment 24, wherein the linker polypeptides that separate the translation products of the first, second, and third polynucleotides are 2A polypeptides.
      26. A modified cell transduced or transfected with a nucleic acid of any one of embodiments 8-25.
      27. A modified cell, comprising
   [0979] a) a first polynucleotide encoding a chimeric pro-apoptotic polypeptide, wherein the chimeric pro-apoptotic polypeptide comprises
      [0980] (i) a pro-apoptotic polypeptide region;
      [0981] (ii) a FRB or FRB variant region; and
      [0982] (iii) a FKBP12 polypeptide region; and
   [0983] b) a second polynucleotide encoding a chimeric costimulating polypeptide, wherein the chimeric costimulating polypeptide comprises
      (i) two FKBP12 variant regions;
      (ii) a MyD88 polypeptide region or a truncated MyD88 polypeptide region lacking the TIR domain; and
      (iii) a CD40 cytoplasmic polypeptide region lacking the CD40 extracellular domain.
      27.5. A modified cell, comprising
   [0984] a) a first polynucleotide encoding a chimeric pro-apoptotic polypeptide, wherein the chimeric pro-apoptotic polypeptide comprises
      [0985] (i) a pro-apoptotic polypeptide region;
      [0986] (ii) a FRB or FRB variant region; and
      [0987] (iii) a FKBP12 polypeptide region; and
   [0988] b) a second polynucleotide encoding a chimeric costimulating polypeptide, wherein the chimeric costimulating polypeptide comprises
      (i) two FKBP12 variant regions; and
      (ii) a MyD88 polypeptide region or a truncated MyD88 polypeptide region lacking the TIR domain.
      28. The modified cell of any one of embodiments 27 and 27.5, wherein the FKBP12 variant regions bind to a ligand with at least 100 times less affinity than the ligand binds to the FKBP12 region.
      29. The modified cell of embodiment 27, wherein the FKBP12 variant regions bind to a ligand with at least 500 times less affinity than the ligand binds to the FKBP12 region.
      30. The modified cell of embodiment 27, wherein the FKBP12 variant regions bind to a ligand with at least 1000 times less affinity than the ligand binds to the FKBP12 region.
      31. The modified cell of any one of embodiments 27-30, wherein the FKBP12 variant regions are FKBP12v36 regions.
      31.1. The modified cell of embodiment 31, wherein the ligand is AP1903.
      32. A modified cell, comprising
   [0989] a) a first polynucleotide encoding a chimeric pro-apoptotic polypeptide, wherein the chimeric pro-apoptotic polypeptide comprises
      [0990] (i) a pro-apoptotic polypeptide region;
      [0991] (ii) a FRB or FRB variant region; and
      [0992] (iii) a FKBP12 polypeptide region; and
   [0993] b) a second polynucleotide encoding a chimeric costimulating polypeptide, wherein the chimeric costimulating polypeptide comprises
      [0994] (i) two FKBP12 v36 regions;
      [0995] (ii) a MyD88 polypeptide region or a truncated MyD88 polypeptide region lacking the TIR domain; and
      [0996] (iii) a CD40 cytoplasmic polypeptide region lacking the CD40 extracellular domain.
         33. The modified cell of any one of embodiments 27-32, wherein the order of regions (i), (ii), and (iii), from the amino terminus to the carboxyl terminus of the chimeric pro-apoptotic polypeptide is (iii), (ii), (i).
         34. The modified cell of any one of embodiments 27-32, wherein the order of regions (i), (ii), and (iii), from the amino terminus to the carboxyl terminus of the chimeric pro-apoptotic polypeptide is (ii), (iii), (i).
         35. The modified cell of any one of embodiments 27-34, further comprising linker polypeptides between regions (a), (b), and (c) of the chimeric pro-apoptotic polypeptide.
         36. The modified cell of any one of embodiments 26-35, wherein the cell further comprises a chimeric antigen receptor.
         37. The modified cell of embodiment 36, wherein the chimeric antigen receptor comprises (i) a transmembrane region, (ii) a T cell activation molecule, and (iii) an antigen recognition moiety.
         38. The modified cell of any one of embodiments 26-35, wherein the cell further comprises a chimeric T cell receptor.
         39. The modified cell of embodiment 7, or of embodiments A27-A56, wherein the cell is a T cell, tumor infiltrating lymphocyte, NK-T cell, or NK cell.
         40. The modified cell of embodiment 7, or of embodiments A27-A56, wherein the cell is a T cell.
         41. The modified cell of embodiment 7, or of embodiments A27-A56, wherein the cell is a primary T cell.
         42. The modified cell of embodiment 7, or of embodiments A27-A56, wherein the cell is a cytotoxic T cell.
         43. The modified cell of embodiment 7, or of embodiments A27-A56, wherein the cell is selected from the group consisting of embryonic stem cell (ESC), inducible pluripotent stem cell (iPSC), non-lymphocytic hematopoietic cell, non-hematopoietic cell, macrophage, keratinocyte, fibroblast, melanoma cell, tumor infiltrating lymphocyte, natural killer cell, natural killer T cell, or T cell.
         44. The modified cell of embodiment 7, or of embodiments A27-A56, wherein the T cell is a helper T cell.
         45. The modified cell of any one of embodiments 7, or 39-44, or of embodiments A27-A56, wherein the cell is obtained or prepared from bone marrow.
         46. The modified cell of any one of embodiments 7, or 39-44, or of embodiments A27-A56, wherein the cell is obtained or prepared from umbilical cord blood.
         47. The modified cell of any one of embodiments 7, or 39-44, or of embodiments A27-A56, wherein the cell is obtained or prepared from peripheral blood.
         48. The modified cell of any one of embodiments 7, or 39-44, or of embodiments A27-A56, wherein the cell is obtained or prepared from peripheral blood mononuclear cells.
         49. The modified cell of any one of embodiments 7, or 39-48, or of embodiments A27-A56, wherein the cell is a human cell.
         50. The modified cell of any one of embodiments 7, or 39-49, or of embodiments A27-A56, wherein the modified cell is transduced or transfected in vivo.
         51. The modified cell of any one of embodiments 7, or 39-50, or of embodiments A27-A56, wherein the cell is transfected or transduced by the nucleic acid vector using a method selected from the group consisting of electroporation, sonoporation, biolistics (e.g., Gene Gun with Au-particles), lipid transfection, polymer transfection, nanoparticles, or polyplexes.
         52. The modified cell of any one of embodiments 26-38, or of embodiments A27-A56, wherein the cell is a T cell, tumor infiltrating lymphocyte, NK-T cell, or NK cell.
         53. The modified cell of any one of embodiments 26-38, or of embodiments A27-A56, wherein the cell is a T cell.
         54. The modified cell of any one of embodiments 26-38, or of embodiments A27-A56, wherein the cell is a primary T cell.
         55. The modified cell of any one of embodiments 26-38, or of embodiments A27-A56, wherein the cell is a cytotoxic T cell.
         56. The modified cell of any one of embodiments 26-38, or of embodiments A27-A56, wherein the cell is selected from the group consisting of embryonic stem cell (ESC), inducible pluripotent stem cell (iPSC), non-lymphocytic hematopoietic cell, non-hematopoietic cell, macrophage, keratinocyte, fibroblast, melanoma cell, tumor infiltrating lymphocyte, natural killer cell, natural killer T cell, or T cell.
         57. The modified cell of any one of embodiments 26-38, or of embodiments A27-A56, wherein the T cell is a helper T cell.
         58. The modified cell of any one of embodiments 26-38, or 52-57, or of embodiments A27-A56, wherein the cell is obtained or prepared from bone marrow.
         59. The modified cell of any one of embodiments 26-38, or 52-57, or of embodiments A27-A56, wherein the cell is obtained or prepared from umbilical cord blood.
         60. The modified cell of any one of embodiments 26-38, or 52-57, or of embodiments A27-A56, wherein the cell is obtained or prepared from peripheral blood.
         61. The modified cell of any one of embodiments 26-38, or 52-57, or of embodiments A27-A56, wherein the cell is obtained or prepared from peripheral blood mononuclear cells.
         62. The modified cell of any one of embodiments 26-38, or 52-61, or of embodiments A27-A56, wherein the cell is a human cell.
         63. The modified cell of any one of embodiments 26-38, or 52-62, or of embodiments A27-A56, wherein the modified cell is transduced or transfected in vivo.
         64. The modified cell of any one of embodiments 26-38, or 52-63, or of embodiments A27-A56, wherein the cell is transfected or transduced by the nucleic acid vector using a method selected from the group consisting of electroporation, sonoporation, biolistics (e.g., Gene Gun with Au-particles), lipid transfection, polymer transfection, nanoparticles, or polyplexes.
         64.1. A modified cell, comprising
   [0997] a) a first chimeric pro-apop the chimeric pro-apoptotic polypeptide comprises
      [0998] (i) a pro-apoptotic polypeptide region;
      [0999] (ii) a FRB or FRB variant region; and
      [1000] (iii) a FKBP12 polypeptide region; and
   [1001] b) a chimeric costimulating polypeptide, wherein the chimeric costimulating polypeptide comprises
      [1002] (i) two FKBP12 variant regions;
      [1003] (ii) a MyD88 polypeptide region or a truncated MyD88 polypeptide region lacking the TIR domain; and
      [1004] (iii) a CD40 cytoplasmic polypeptide region lacking the CD40 extracellular domain.
         64.2. A modified cell, comprising
   [1005] a) a first chimeric pro-apop the chimeric pro-apoptotic polypeptide comprises
      [1006] (i) a pro-apoptotic polypeptide region;
      [1007] (ii) a FRB or FRB variant region; and
      [1008] (iii) a FKBP12 polypeptide region; and
   [1009] b) a chimeric costimulating polypeptide, wherein the chimeric costimulating polypeptide comprises
      [1010] (i) two FKBP12 variant regions; and
      [1011] (ii) a MyD88 polypeptide region or a truncated MyD88 polypeptide region lacking the TIR domain.
         64.2. The modified cell of claim 64.1 or 64.2, comprising a first polynucleotide that encodes the first chimeric polypeptide and a second polynucleotide that encodes the second polypeptide.
         64.3. A kit or composition comprising nucleic acid comprising a first polynucleotide and a second polynucleotide, wherein
   [1012] a) the first polynucleotide encodes a chimeric pro-apoptotic polypeptide, wherein the chimeric pro-apoptotic polypeptide comprises
      [1013] (i) a pro-apoptotic polypeptide region;
      [1014] (ii) a FRB or FRB variant region; and
      [1015] (iii) a FKBP12 polypeptide region; and
   [1016] b) the second polynucleotide encodes a chimeric costimulating polypeptide, wherein the chimeric costimulating polypeptide comprises
      [1017] (i) two FKBP12 variant regions;
      [1018] (ii) a MyD88 polypeptide region or a truncated MyD88 polypeptide region lacking the TIR domain; and
      [1019] (iii) a CD40 cytoplasmic polypeptide region lacking the CD40 extracellular domain.
         65. The nucleic acid or cell of any one of embodiments 5, 7, or 17.1-64, or of embodiments A1-A56, wherein the marker polypeptide is a ΔCD19 polypeptide.
         66. The nucleic acid or cell of any one of embodiments 1-9, 12-31.1, or 33-65, wherein the FKBP12 variant region has an amino acid substitution at position 36 selected from the group consisting of valine, leucine, isoleuceine and alanine.
         67. The nucleic acid or cell of embodiment 66, wherein FKBP variant region is an FKBP12v36 region.
         68. The nucleic acid or cell of any one of embodiments 1-67, wherein the FRB variant region is selected from the group consisting of KLW (T2098L), KTF (W2101F), and KLF (T2098L, W2101F).
         69. The nucleic acid or cell of any one of embodiments 1-67, wherein the FRB variant region is FRB_{L}
         70. The nucleic acid or cell of any one of embodiments 1-69, wherein the FRB variant region binds to a rapalog selected from the group consisting of S-o,p-dimethoxyphenyl (DMOP)-rapamycin, R-Isopropoxyrapamycin, and S-Butanesulfonamidorap.
         71. The nucleic acid or cell of any one of embodiments 1-70, wherein the pro-apoptotic polypeptide is selected from the group consisting of caspase 1, 2, 3, 4, 5, 6, 7, 8, 9, 10, 11, 12, 13, or 14, FADD (DED), APAF1 (CARD), CRADD/RAIDD CARD), ASC (CARD), Bax, Bak, Bcl-xL, Bcl-2, RIPK3, and RIPK1-RHIM.
         72. The nucleic acid or cell of any one of embodiments 1-71, wherein the pro-apoptotic polypeptide is a caspase polypeptide.
         73. The nucleic acid or cell of embodiment 84, wherein the pro-apoptotic polypeptide is a Caspase-9 polypeptide.
         74. The nucleic acid of cell of embodiment 73, wherein the Caspase-9 polypeptide lacks the CARD domain.
         75. The nucleic acid or cell of any one of embodiments 73 or 74, wherein the caspase polypeptide comprises the amino acid sequence of SEQ ID NO: 300.
         76. The nucleic acid or cell of any one of embodiments 73 or 74, wherein the caspase polypeptide is a modified Caspase-9 polypeptide comprising an amino acid substitution selected from the group consisting of the catalytically active caspase variants in Tables 5 or 6.
         77. The nucleic acid or cell of embodiment 76, wherein the caspase polypeptide is a modified Caspase-9 polypeptide comprising an amino acid sequence selected from the group consisting of D330A, D330E, and N405Q.
         78. The nucleic acid or cell of any one of embodiments 8-38, or 52-77, wherein the truncated MyD88 polypeptide has the amino acid sequence of SEQ ID NO: 214, or a functional fragment thereof.
         79. The nucleic acid or cell of any one of embodiments 8-38, or 52-77, wherein the MyD88 polypeptide has the amino acid sequence of SEQ ID NO: 282, or a functional fragment thereof.
         80. The nucleic acid or cell of any one of embodiments 8-38, or 52-77, wherein the cytoplasmic CD40 polypeptide has the amino acid sequence of SEQ ID NO: 216, or a functional fragment thereof.
         81. The nucleic acid or cell of any one of embodiments 23, 26, 38, or 52-64, wherein the T cell receptor binds to an antigenic polypeptide selected from the group consisting of PRAME, Bob-1, and NY-ESO-1.
         82. The nucleic acid or cell of any one of embodiments 22, 26, 37, or 52-80, wherein the antigen recognition moiety binds to an antigen selected from the group consisting of an antigen on a tumor cell, an antigen on a cell involved in a hyperproliferative disease, a viral antigen, a bacterial antigen, CD19, PSCA, Her2/Neu, PSMA, Muc1Muc1, Muc1 ROR1, Mesothelin, GD2, CD123, Muc16, CD33, CD38, and CD44v6.
         83. The nucleic acid or cell of any one of embodiments 22, 26, 37, 52-80, or 82, wherein the T cell activation molecule is selected from the group consisting of an ITAM-containing, Signal 1 conferring molecule, a CD3 ζ polypeptide, and an Fc epsilon receptor gamma (FcεR1γ) subunit polypeptide.
         84. The nucleic acid or cell of any one of embodiments 22, 26, 37, 52-80, or 82-83, wherein the antigen recognition moiety is a single chain variable fragment.
         85. The nucleic acid or cell of any one of embodiments 22, 26, 37, 52-80, or 82-84, wherein the transmembrane region is a CD8 transmembrane region.
         86. The nucleic acid of any one of embodiments 1-5, 8-25, or 65-85, wherein the nucleic acid is contained within a viral vector.
         87. The nucleic acid of embodiment 86, wherein the viral vector is selected from the group consisting of retroviral vector, murine leukemia virus vector, SFG vector, adenoviral vector, lentiviral vector, adeno-associated virus (AAV), Herpes virus, and Vaccinia virus.
         88. The nucleic acid of any one of embodiments 1-5, 8-25, or 65-87, wherein the nucleic acid is prepared or in a vector designed for electroporation, sonoporation, or biolistics, or is attached to or incorporated in chemical lipids, polymers, inorganic nanoparticles, or polyplexes.
         89. The nucleic acid of any one of embodiments 1-5 8-25, or 65-85, wherein the nucleic acid is contained within a plasmid.
         90. The nucleic acid or cell of any one of embodiments 1-89, comprising a polynucleotide coding for a polypeptide provided in the tables of Examples 23 or 25.
         91. The nucleic acid or cell of any one of embodiments 1-89, comprising a polynucleotide coding for a polypeptide provided in the tables of Examples 23 or 25 selected from group consisting of FKBPv36, FpK′, FpK, Fv, Fv′, FKBPpK′, FKBPpK″, and FKBPpK′″.
         92. The nucleic acid or cell of any one of embodiments 1-89, comprising a polynucleotide coding for a polypeptide provided in the tables of Examples 23 or 25 selected from group consisting of FRPS-VL, FRPS-VH, FMC63-VL, and FMC63-VH.
         93. The nucleic acid or cell of any one of embodiments 1-89, comprising a polynucleotide coding for FRPS-VL and FRPS-VH.
         94. The nucleic acid or cell of any one of embodiments 1-89, comprising a polynucleotide coding for FMC63-VL and FMC63-VH.
         95. The nucleic acid or cell of any one of embodiments 1-89, comprising a polynucleotide coding for a polypeptide provided in the tables of Examples 23 or 25 selected from group consisting of MyD88L and MyD88.
         96. The nucleic acid or cell of any one of embodiments 1-89, comprising a polynucleotide coding for a ΔCaspase-9 polypeptide provided in the tables of Examples 23 or 25.
         97. The nucleic acid or cell of any one of embodiments 1-89, comprising a polynucleotide coding for a ΔCD18 polypeptide provided in the tables of Examples 23 or 25.
         98. The nucleic acid or cell of any one of embodiments 1-89, comprising a polynucleotide coding for a hCD40 polypeptide provided in the tables of Examples 23 or 25.
         99. The nucleic acid or cell of any one of embodiments 1-89, comprising a polynucleotide coding for a CD3 zeta polypeptide provided in the tables of Examples 23 or 25.

### 100. Reserved.

[1020] 101. A method of stimulating an immune response in a subject, comprising:
[1021] a) transplanting modified cells of any one of embodiments A27-A56, 26-38, or 52-85 into the subject, and
[1022] b) after (a), administering an effective amount of a ligand that binds to the FKBP12 variant region of the chimeric costimulating polypeptide to stimulate a cell mediated immune response.
   102. A method of administering a ligand to a human subject who has undergone cell therapy using modified cells, comprising administering a ligand that binds to the FKBP variant region of the chimeric costimulating polypeptide to the human subject, wherein the modified cells comprise modified cells of any one of embodiments A27-A56, 26-38, or 52-85.
   103. A method of controlling activity of transplanted modified cells in a subject, comprising:
[1023] a) transplanting a modified cell of any one of embodiments A27-A56, 26-38, or 52-85; and
[1024] b) after (a), administering an effective amount of a ligand that binds to the FKBP12 variant region of the chimeric costimulating polypeptide to stimulate the activity of the transplanted modified cells.
   104. A method for treating a subject having a disease or condition associated with an elevated expression of a target antigen expressed by a target cell, comprising
[1025] (a) transplanting an effective amount of modified cells into the subject; wherein the modified cells comprise a modified cell of any one of embodiments A27-A56, 26-38, or 52-85, wherein the modified cell comprises a chimeric antigen receptor comprising an antigen recognition moiety that binds to the target antigen, and
[1026] (b) after a), administering an effective amount of a ligand that binds to the FKBP12 variant region of the chimeric costimulating polypeptide to reduce the number or concentration of target antigen or target cells in the subject.
   105. The method of embodiment 104, wherein the target antigen is a tumor antigen.
   106. A method for treating a subject having a disease or condition associated with an elevated expression of a target antigen expressed by a target cell, comprising
[1027] (a) administering to the subject an effective amount of modified cells, wherein the modified cells comprise a modified cell of any one of embodiments A27-A56, 26-38, or 52-85, wherein the modified cell comprises a chimeric T cell receptor that recognizes and binds to the target antigen, and
[1028] (b) after a), administering an effective amount of a ligand that binds to the FKBP12 variant region of the chimeric costimulating polypeptide to reduce the number or concentration of target antigen or target cells in the subject.
   107. A method for reducing the size of a tumor in a subject, comprising
[1029] a) administering a modified cell of any one of embodiments A27-A56, 26-38, or 52-85 to the subject, wherein the cell comprises a chimeric antigen receptor comprising an antigen recognition moiety that binds to an antigen on the tumor; and
[1030] b) after a), administering an effective amount of a ligand that binds to the FKBP12 variant region of the chimeric costimulating polypeptide to reduce the size of the tumor in the subject.
   108. The method of any one of embodiments 104-107, comprising measuring the number or concentration of target cells in a first sample obtained from the subject before administering second ligand, measuring the number or concentration of target cells in a second sample obtained from the subject after administering the ligand, and determining an increase or decrease of the number or concentration of target cells in the second sample compared to the number or concentration of target cells in the first sample.
   109. The method of embodiment 108, wherein the concentration of target cells in the second sample is decreased compared to the concentration of target cells in the first sample.
   110. The method of embodiment 108, wherein the concentration of target cells in the second sample is increased compared to the concentration of target cells in the first sample.
   111. The method of any one of embodiments 101-110, wherein the subject has received a stem cell transplant before or at the same time as administration of the modified cells.
   112. The method of any one of embodiments 101-111, wherein at least 1×10⁶ transduced or transfected modified cells are administered to the subject.
   113. The method of any one of embodiments 101-111, wherein at least 1×10⁷ transduced or transfected modified cells are administered to the subject.
   114. The method of any one of embodiments 101-111, wherein at least 1×10⁸ modified cells are administered to the subject.
   114.1. The method of any one of embodiments 101-114, wherein the FKBP12 variant region is FKBP12v36 and the ligand that binds to the FKBP12 variant region is AP1903.
   115. A method of controlling survival of transplanted modified cells in a subject, comprising
[1031] a) transplanting modified cells of any one of embodiments A27-A56, 26-38, 52-64, or 65-85 into the subject, and
[1032] b) after (a), administering to the subject rapamycin or a rapalog that binds to the FRB or FRB variant region of the chimeric pro-apoptotic polypeptide in an amount effective to kill less than 30% of the modified cells that express the chimeric pro-apoptotic polypeptide.
   116. The method of any one of embodiments 101-114.1, further comprising after (b), administering to the subject rapamycin or a rapalog that binds to the FRB variant region of the chimeric pro-apoptotic polypeptide in an amount effective to kill less than 30% of the modified cells that express the chimeric pro-apoptotic polypeptide.
   116.1. the method of embodiment 116, wherein the rapamycin or rapalog is administered in an amount effective to kill at least 30% of the modified cells that express the chimeric pro-apoptotic polypeptide.
   117. The method of any one of embodiments 115 or 116, wherein the rapamycin or rapalog is administered in an amount effective to kill less than 40% of the modified cells that express the chimeric pro-apoptotic polypeptide.
   118. The method of any one of embodiments 115 or 116, wherein the rapamycin or rapalog is administered in an amount effective to kill less than 50% of the modified cells that express the chimeric pro-apoptotic polypeptide.
   119. The method of any one of embodiments 115 or 116, wherein the rapamycin or rapalog is administered in an amount effective to kill less than 60% of the modified cells that express the chimeric pro-apoptotic polypeptide.
   120. The method of any one of embodiments 115 or 116, wherein the rapamycin or rapalog is administered in an amount effective to kill less than 70% of the modified cells that express the chimeric pro-apoptotic polypeptide.
   121. The method of any one of embodiments 115 or 116, wherein the rapamycin or rapalog is administered in an amount effective to kill less than 90% of the modified cells that express the chimeric pro-apoptotic polypeptide.
   122. The method of any one of embodiments 115 or 116, wherein the rapamycin or rapalog is administered in an amount effective to kill at least 90% of the modified cells that express the chimeric pro-apoptotic polypeptide.
   123. The method of any one of embodiments 115 or 116, wherein the rapamycin or rapalog is administered in an amount effective to kill at least 95% of the modified cells that express the chimeric pro-apoptotic polypeptide.
   124. The method of any one of embodiments 115-116, wherein the chimeric pro-apoptotic polypeptide comprises a FRB_{L} region.
   125. The method of any one of embodiments 101-114.1, wherein more than one dose of the ligand is administered to the subject.
   126. The method of any one of embodiments 115-125, wherein more than one dose of the rapamycin or rapalog is administered to the subject.
   127. The method of any one of embodiments 101-125, further comprising
[1033] identifying a presence or absence of a condition in the subject that requires the removal of the modified cells from the subject; and
[1034] administering rapamycin or a rapalog, maintaining a subsequent dosage of rapamycin or the rapalog, or adjusting a subsequent dosage of the rapamycin or the rapalog to the subject based on the presence or absence of the condition identified in the subject.
   128. The method of any one of embodiments 101-125, further comprising
   receiving information comprising presence or absence of a condition in the subject that requires the removal of the modified cells from the subject; and
   administering the rapamycin or rapalog, maintaining a subsequent dosage of rapamycin or the rapalog, or adjusting a subsequent dosage of rapamycin or the rapalog to the subject based on the presence or absence of the condition identified in the subject.
   129. The method of any one of embodiments 101-125, further comprising
   identifying a presence or absence of a condition in the subject that requires the removal of the modified cells from the subject; and
   transmitting the presence, absence or stage of the condition identified in the subject to a decision maker who administers rapamycin or the rapalog, maintains a subsequent dosage of the rapamycin or the rapalog, or adjusts a subsequent dosage of the rapamycin or the rapalog administered to the subject based on the presence, absence or stage of the condition identified in the subject.
   130. The method of any one of embodiments 101-125, further comprising identifying a presence or absence of a condition in the subject that requires the removal of the modified cells from the subject; and
   transmitting an indication to administer the rapamycin or the rapalog, maintain a subsequent dosage of the rapamycin or the rapalog, or adjust a subsequent dosage of the rapamycin or the rapalog administered to the subject based on the presence, absence or stage of the condition identified in the subject.
   131. The method of any one of embodiments 101-130, wherein the subject has cancer.
   132. The method of any one of embodiments 101-131, wherein the modified cell is delivered to a tumor bed.
   133. The method of any one of embodiments 131 or 132, wherein the cancer is present in the blood or bone marrow of the subject.
   134. The method of any one of embodiments 101-130, wherein the subject has a blood or bone marrow disease.
   135. The method of any one of embodiments 101-130, wherein the subject has been diagnosed with sickle cell anemia or metachromatic leukodystrophy.
   136. The method of any one of embodiments 101-130, wherein the patient has been diagnosed with a condition selected from the group consisting of a primary immune deficiency condition, hemophagocytosis lymphohistiocytosis (HLH) or other hemophagocytic condition, an inherited marrow failure condition, a hemoglobinopathy, a metabolic condition, and an osteoclast condition.
   137. The method of any one of embodiments 101-130, wherein the patient has been diagnosed with a disease or condition selected from the group consisting of Severe Combined Immune Deficiency (SCID), Combined Immune Deficiency (CID), Congenital T-cell Defect/Deficiency, Common Variable Immune Deficiency (CVID), Chronic Granulomatous Disease, IPEX (Immune deficiency, polyendocrinopathy, enteropathy, X-linked) or IPEX-like, Wiskott-Aldrich Syndrome, CD40 Ligand Deficiency, Leukocyte Adhesion Deficiency, DOCA 8 Deficiency, IL-10 Deficiency/IL-10 Receptor Deficiency, GATA 2 deficiency, X-linked lymphoproliferative disease (XLP), Cartilage Hair Hypoplasia, Shwachman Diamond Syndrome, Diamond Blackfan Anemia, Dyskeratosis Congenita, Fanconi Anemia, Congenital Neutropenia, Sickle Cell Disease, Thalassemia, Mucopolysaccharidosis, Sphingolipidoses, and Osteopetrosis.
   138. A method for expressing a chimeric pro-apoptotic polypeptide, wherein the chimeric pro-apoptotic polypeptide comprises
[1035] a) a pro-apoptotic polypeptide region;
[1036] b) a FRB or FRB variant region; and
[1037] c) a FKBP12 polypeptide region,
   comprising contacting a nucleic acid of any one of embodiments 1-6 with a cell under conditions in which the nucleic acid is incorporated into the cell, whereby the cell expresses the first and second chimeric polypeptides from the incorporated nucleic acid.
   139. The method of embodiment 138, wherein the nucleic acid is contacted with the cell ex vivo.
   140 The method of embodiment 138, wherein the nucleic acid is contacted with the cell in vivo.

### 141-200. Reserved.

[1038] 201. A nucleic acid comprising a promoter operably linked to a polynucleotide coding for a chimeric costimulating polypeptide wherein the chimeric costimulating polypeptide comprises
[1039] a) a costimulating polypeptide region comprising
   (i) a MyD88 polypeptide region or a truncated MyD88 polypeptide region lacking the TIR domain; and
   (ii) a CD40 cytoplasmic polypeptide region lacking the CD40 extracellular domain;
[1040] b) a FRB or FRB variant region; and
[1041] c) a FKBP12 polypeptide region.
   202. The nucleic acid of embodiment 201, wherein the order of regions (a), (b), and (c), from the amino terminus to the carboxyl terminus of the chimeric costimulating polypeptide is (c), (b), (a).
   203. The nucleic acid of embodiment 201, wherein the order of regions (a), (b), and (c), from the amino terminus to the carboxyl terminus of the chimeric costimulating polypeptide is (b), (c), (a).
   204. The nucleic acid of any one of embodiments 201 to 203, further comprising linker polypeptides between regions (a), (b), and (c) of the chimeric costimulating polypeptide.
   205. The nucleic acid of any one of embodiments 201-204, further comprising a polynucleotide coding for a marker polypeptide.
   206. A polypeptide encoded by a nucleic acid of any one of embodiments 201 to 205.
   207. A modified cell transfected or transduced with a nucleic acid of any one of embodiments 201 to 205.
   208. A nucleic acid comprising a promoter operably linked to
[1042] a first polynucleotide encoding a chimeric costimulating polypeptide, comprising
[1043] a) a costimulating polypeptide region comprising
   (i) a MyD88 polypeptide region or a truncated MyD88 polypeptide region lacking the TIR domain; and
   (ii) a CD40 cytoplasmic polypeptide region lacking the CD40 extracellular domain;
[1044] b) a FRB or FRB variant region; and
[1045] c) a FKBP12 polypeptide region; and
[1046] a second polynucleotide encoding a chimeric pro-apoptotic polypeptide, wherein the chimeric pro-apoptotic polypeptide comprises
[1047] a) two FKBP12 variant regions; and
[1048] b) a pro-apoptotic polypeptide region.
   208.1. A nucleic acid comprising a promoter operably linked to
[1049] a first polynucleotide encoding a chimeric costimulating polypeptide, comprising
[1050] a) a costimulating polypeptide region comprising a MyD88 polypeptide region or a truncated MyD88 polypeptide region lacking the TIR domain;
[1051] b) a FRB or FRB variant region; and
[1052] c) a FKBP12 polypeptide region; and
[1053] a second polynucleotide encoding a chimeric pro-apoptotic polypeptide, wherein the chimeric pro-apoptotic polypeptide comprises
[1054] a) two FKBP12 variant regions; and
[1055] b) a pro-apoptotic polypeptide region.
   209. The nucleic acid of embodiment 208, wherein the FKBP12 variant regions bind to a ligand with at least 100 times less affinity than the ligand binds to the FKBP12 region.
   209.1. The nucleic acid of embodiment 208, wherein the FKBP12 variant regions bind to a ligand with at least 500 times less affinity than the ligand binds to the FKBP12 region.
   209.2. The nucleic acid of embodiment 208, wherein the FKBP12 variant regions bind to a ligand with at least 1000 times less affinity than the ligand binds to the FKBP12 region.
   210. The nucleic acid of embodiment 208, wherein the FKBP12 variant regions are FKBP12v36 regions.
   211. A nucleic acid comprising a promoter operably linked to
[1056] a first polynucleotide encoding a chimeric costimulating polypeptide, comprising
[1057] a) a costimulating polypeptide region comprising
   (i) a MyD88 polypeptide region or a truncated MyD88 polypeptide region lacking the TIR domain; and
   (ii) a CD40 cytoplasmic polypeptide region lacking the CD40 extracellular domain;
[1058] b) a FRB or FRB variant region; and
[1059] c) a FKBP12 polypeptide region; and
[1060] a second polynucleotide encoding a chimeric pro-apoptotic polypeptide, wherein the chimeric pro-apoptotic polypeptide comprises
[1061] a) two FKBP12v36 regions; and
[1062] b) a pro-apoptotic polypeptide region.
   212. The nucleic acid of any one of embodiments 208-211, wherein the order of regions (a), (b), and (c), from the amino terminus to the carboxyl terminus of the chimeric costimulating polypeptide is (c), (b), (a).
   213. The nucleic acid of any one of embodiments 208-211, wherein the order of regions (a), (b), and (c), from the amino terminus to the carboxyl terminus of the chimeric costimulating polypeptide is (b), (c), (a).
   214. The nucleic acid of any one of embodiments 208 to 213, further comprising linker polypeptides between regions (a), (b), and (c) of the chimeric costimulating polypeptide.
   215. The nucleic acid of any one of embodiments 208-214, wherein the nucleic acid further comprises a polynucleotide encoding a linker polypeptide between the first and second polynucleotides, wherein the linker polypeptide separates the translation products of the first and second polynucleotides during or after translation.
   216. The nucleic acid of embodiment 215, wherein the linker polypeptide that separates the translation products of the first and second polynucleotides is a 2A polypeptide.
   217. The nucleic acid of any one of embodiments 208-216, wherein the promoter is operably linked to the first polynucleotide and the second polynucleotide.
   217.1. The nucleic acid of any one of embodiments 208-217, further comprising a polynucleotide coding for a marker polypeptide.
   218. The nucleic acid of any one of embodiments 201-205, or 208-217.1, wherein the promoter is developmentally regulated.
   219. The nucleic acid of any one of embodiments 201-205, or 208-217.1, wherein the promoter is tissue-specific.
   220. The nucleic acid of any one of embodiments 201-205, or 208-219, wherein the promoter is activated in activated T cells.
   221. The nucleic acid of any one of embodiments 208-220, further comprising a third polynucleotide coding for a chimeric antigen receptor.
   222. The nucleic acid of embodiment 21, wherein the chimeric antigen receptor comprises (i) a transmembrane region, (ii) a T cell activation molecule, and (iii) an antigen recognition moiety.
   223. The nucleic acid of any one of embodiments 208-220, further comprising a third polynucleotide coding for a chimeric T cell receptor.
   224. The nucleic acid of any one of embodiments 221-223, further comprising polynucleotides encoding linker polypeptides between the first, second, and third polynucleotides, wherein the linker polypeptides separate the translation products of the first and second polynucleotides during or after translation.
   225. The nucleic acid of embodiment 224, wherein the linker polypeptide that separates the translation products of the first, second, and third polynucleotides is a 2A polypeptide.
   226. A modified cell transduced or transfected with a nucleic acid of any one of embodiments 208-225.
   227. A modified cell, comprising
   a first polynucleotide encoding a chimeric costimulating polypeptide, comprising
[1063] a) a costimulating polypeptide region comprising
   (i) a MyD88 polypeptide region or a truncated MyD88 polypeptide region lacking the TIR domain; and
   (ii) a CD40 cytoplasmic polypeptide region lacking the CD40 extracellular domain;
[1064] b) a FRB or FRB variant region; and
[1065] c) a FKBP12 polypeptide region; and
[1066] a second polynucleotide encoding a chimeric pro-apoptotic polypeptide, wherein the chimeric pro-apoptotic polypeptide comprises
[1067] a) two FKBP12 variant regions;
[1068] b) a pro-apoptotic polypeptide region.
   228. The modified cell of embodiment 227, wherein the FKBP12 variant regions bind to a ligand with at least 100 times less affinity than the ligand binds to the FKBP12 region.
   229. The modified cell of embodiment 227, wherein the FKBP12 variant regions bind to a ligand with at least 500 times less affinity than the ligand binds to the FKBP12 region.
   230. The modified cell of embodiment 227, wherein the FKBP12 variant regions bind to a ligand with at least 1000 times less affinity than the ligand binds to the FKBP12 region.
   231. The modified cell of any one of embodiments 227-230, wherein the FKBP12 variant regions are FKBP12v36 regions.
   231.1. The modified cell of embodiment 231, wherein the ligand is AP1903.
   232. A modified cell, comprising
[1069] a first polynucleotide encoding a chimeric costimulating polypeptide, comprising
[1070] a) a costimulating polypeptide region comprising
   (i) a MyD88 polypeptide region or a truncated MyD88 polypeptide region lacking the TIR domain; and
   (ii) a CD40 cytoplasmic polypeptide region lacking the CD40 extracellular domain;
[1071] b) a FRB or FRB variant region; and
[1072] c) a FKBP12 polypeptide region; and
[1073] a second polynucleotide encoding a chimeric pro-apoptotic polypeptide, wherein the chimeric pro-apoptotic polypeptide comprises
[1074] a) two FKBP12 v36 regions;
[1075] b) a pro-apoptotic polypeptide region.
   233. The modified cell of any one of embodiment 227-232, wherein the order of regions (a), (b), and (c), from the amino terminus to the carboxyl terminus of the chimeric costimulating polypeptide is (c), (b), (a).
   234 The modified cell of any one of embodiment 227-232, wherein the order of regions (a), (b), and (c), from the amino terminus to the carboxyl terminus of the chimeric costimulating polypeptide is (b), (c), (a).
   235. The modified cell of any one of embodiment 227-235, further comprising linker polypeptides between regions (a), (b), and (c) of the chimeric costimulating polypeptide.
   236. The modified cell of any one of embodiment 226-234, wherein the cell further comprises a chimeric antigen receptor.
   237. The modified cell of embodiment 236, wherein the chimeric antigen receptor comprises (i) a transmembrane region, (ii) a T cell activation molecule, and (iii) an antigen recognition moiety.
   238. The modified cell of any one of embodiment 226-235, wherein the cell further comprises a chimeric T cell receptor.
   239. The modified cell of embodiment 207, wherein the cell is a T cell, tumor infiltrating lymphocyte, NK-T cell, or NK cell.
   240. The modified cell of embodiment 207, wherein the cell is a T cell.
   241. The modified cell of embodiment 207, wherein the cell is a primary T cell.
   242. The modified cell of embodiment 207, wherein the cell is a cytotoxic T cell.
   243. The modified cell of embodiment 207, wherein the cell is selected from the group consisting of embryonic stem cell (ESC), inducible pluripotent stem cell (iPSC), non-lymphocytic hematopoietic cell, non-hematopoietic cell, macrophage, keratinocyte, fibroblast, melanoma cell, tumor infiltrating lymphocyte, natural killer cell, natural killer T cell, or T cell.
   244. The modified cell of embodiment 207, wherein the T cell is a helper T cell.
   245. The modified cell of any one of embodiments 207, or 239-244, wherein the cell is obtained or prepared from bone marrow.
   246. The modified cell of any one of embodiments 207, or 239-244, wherein the cell is obtained or prepared from umbilical cord blood.
   247. The modified cell of any one of embodiments 207, or 239-244, wherein the cell is obtained or prepared from peripheral blood.
   248. The modified cell of any one of embodiments 207, or 239-244, wherein the cell is obtained or prepared from peripheral blood mononuclear cells.
   249. The modified cell of any one of embodiments 207, or 239-248, wherein the cell is a human cell.
   250. The modified cell of any one of embodiments 207, or 239-249, wherein the modified cell is transduced or transfected in vivo.
   251. The modified cell of any one of embodiments 207, or 239-250, wherein the cell is transfected or transduced by the nucleic acid vector using a method selected from the group consisting of electroporation, sonoporation, biolistics (e.g., Gene Gun with Au-particles), lipid transfection, polymer transfection, nanoparticles, or polyplexes.
   252. The modified cell of any one of embodiment 226-238, wherein the cell is a T cell, tumor infiltrating lymphocyte, NK-T cell, or NK cell.
   253. The modified cell of any one of embodiment 226-238, wherein the cell is a T cell.
   254. The modified cell of any one of embodiment 226-238, wherein the cell is a primary T cell.
   255. The modified cell of any one of embodiment 226-238, wherein the cell is a cytotoxic T cell.
   256. The modified cell of any one of embodiment 226-238, wherein the cell is selected from the group consisting of embryonic stem cell (ESC), inducible pluripotent stem cell (iPSC), non-lymphocytic hematopoietic cell, non-hematopoietic cell, macrophage, keratinocyte, fibroblast, melanoma cell, tumor infiltrating lymphocyte, natural killer cell, natural killer T cell, or T cell.
   257. The modified cell of any one of embodiment 226-238, wherein the T cell is a helper T cell.
   258. The modified cell of any one of embodiment 226-238, or 252-257, wherein the cell is obtained or prepared from bone marrow.
   259. The modified cell of any one of embodiment 226-238, or 252-257, wherein the cell is obtained or prepared from umbilical cord blood.
   260. The modified cell of any one of embodiment 226-238, or 252-257, wherein the cell is obtained or prepared from peripheral blood.
   261. The modified cell of any one of embodiment 226-238, or 252-257, wherein the cell is obtained or prepared from peripheral blood mononuclear cells.
   262. The modified cell of any one of embodiment 226-238, or 252-261, wherein the cell is a human cell.
   263. The modified cell of any one of embodiment 226-238, or 252-262, wherein the modified cell is transduced or transfected in vivo.
   264. The modified cell of any one of embodiment 226-238, or 252-263, wherein the cell is transfected or transduced by the nucleic acid vector using a method selected from the group consisting of electroporation, sonoporation, biolistics (e.g., Gene Gun with Au-particles), lipid transfection, polymer transfection, nanoparticles, or polyplexes.
   264.1. A modified cell, comprising
[1076] a) a first polynucleotide encoding a chimeric costimulating polypeptide, comprising a costimulating polypeptide region comprising
   (i) a MyD88 polypeptide region or a truncated MyD88 polypeptide region lacking the TIR domain; and
   (ii) a CD40 cytoplasmic polypeptide region lacking the CD40 extracellular domain;
   a FRB or FRB variant region; and
   a FKBP12 polypeptide region; and
[1077] b) a second polynucleotide encoding a chimeric pro-apoptotic polypeptide, wherein the chimeric pro-apoptotic polypeptide comprises
   two FKBP12 variant regions; and
   a pro-apoptotic polypeptide region.
   264.2. The modified cell of claim 264.1, comprising a first polynucleotide that encodes the first chimeric polypeptide and a second polynucleotide that encodes the second polypeptide.
   264.3. A kit or composition comprising nucleic acid comprising a first polynucleotide and a
   second polynucleotide, wherein
   the first polynucleotide encodes a chimeric costimulating polypeptide, comprising
[1078] a) a costimulating polypeptide region comprising
   (i) a MyD88 polypeptide region or a truncated MyD88 polypeptide region lacking the TIR domain; and
   (ii) a CD40 cytoplasmic polypeptide region lacking the CD40 extracellular domain;
[1079] b) a FRB or FRB variant region; and
[1080] c) a FKBP12 polypeptide region; and
[1081] the second polynucleotide encodes a chimeric pro-apoptotic polypeptide, wherein the chimeric pro-apoptotic polypeptide comprises
[1082] a) two FKBP12 variant regions; and
[1083] b) a pro-apoptotic polypeptide region.
   265. The nucleic acid or cell of any one of embodiments 205, 207, or 217.1-264, wherein the marker polypeptide is a ΔCD19 polypeptide.
   266. The nucleic acid or cell of any one of embodiments 102-109, 212-231.1, or 233-265, wherein the FKBP12 variant region has an amino acid substitution at position 36 selected from the group consisting of valine, leucine, isoleuceine and alanine.
   267. The nucleic acid or cell of embodiment 266, wherein FKBP variant region is an FKBP12v36 region.
   268. The nucleic acid or cell of any one of embodiments 201-267, wherein the FRB variant region is selected from the group consisting of KLW (T2098L), KTF (W2101F), and KLF (T2098L, W2101F).
   269. The nucleic acid or cell of any one of embodiments 201-267, wherein the FRB variant region is FRB_{L}
   270. The nucleic acid or cell of any one of embodiments 201-269, wherein the FRB variant region binds to a rapalog selected from the group consisting of S-o,p-dimethoxyphenyl (DMOP)-rapamycin, R-Isopropoxyrapamycin, and S-Butanesulfonamidorap.
   271. The nucleic acid or cell of any one of embodiments 201-270, wherein the pro-apoptotic polypeptide is selected from the group consisting of caspase 1, 2, 3, 4, 5, 6, 7, 8, 9, 10, 11, 12, 13, or 14, FADD (DED), APAF1 (CARD), CRADD/RAIDD CARD), ASC (CARD), Bax, Bak, Bcl-xL, Bcl-2, RIPK3, and RIPK1-RHIM.
   272. The nucleic acid or cell of any one of embodiments 208-271, wherein the pro-apoptotic polypeptide is a caspase polypeptide.
   273. The nucleic acid or cell of embodiment 284, wherein the pro-apoptotic polypeptide is a Caspase-9 polypeptide.
   274. The nucleic acid of cell of embodiment 273, wherein the Caspase-9 polypeptide lacks the CARD domain.
   275. The nucleic acid or cell of any one of embodiments 273 or 274, wherein the caspase polypeptide comprises the amino acid sequence of SEQ ID NO: 300.
   276. The nucleic acid or cell of any one of embodiments 273 or 274, wherein the caspase polypeptide is a modified Caspase-9 polypeptide comprising an amino acid substitution selected from the group consisting of the catalytically active caspase variants in Tables 5 or 6.
   277. The nucleic acid or cell of embodiment 276, wherein the caspase polypeptide is a modified Caspase-9 polypeptide comprising an amino acid sequence selected from the group consisting of D330A, D330E, and N405Q.
   278. The nucleic acid or cell of any one of embodiments 201-277, wherein the truncated MyD88 polypeptide has the amino acid sequence of SEQ ID NO: 214, or a functional fragment thereof.
   279. The nucleic acid or cell of any one of embodiments 201-277, wherein the MyD88 polypeptide has the amino acid sequence of SEQ ID NO: 282, or a functional fragment thereof.
   280. The nucleic acid or cell of any one of embodiments 201-277, wherein the cytoplasmic CD40 polypeptide has the amino acid sequence of SEQ ID NO: 216, or a functional fragment thereof.
   281. The nucleic acid or cell of any one of embodiment 223, 226, 38, or 252-280, wherein the T cell receptor binds to an antigenic polypeptide selected from the group consisting of PRAME, Bob-1, and NP-ESO-1.
   282. The nucleic acid or cell of any one of embodiment 222, 226, 237, or 252-280, wherein the antigen recognition moiety binds to an antigen selected from the group consisting of an antigen on a tumor cell, an antigen on a cell involved in a hyperproliferative disease, a viral antigen, a bacterial antigen, CD19, PSCA, Her2/Neu, PSMA, Muc1 ROR1, Mesothelin, GD2, CD123, Muc16, CD33, CD38, and CD44v6.
   283. The nucleic acid or cell of any one of embodiment 222, 226, 237, 252-280, or 282, wherein the T cell activation molecule is selected from the group consisting of an ITAM-containing, Signal 1 conferring molecule, a CD3 ζ polypeptide, and an Fc epsilon receptor gamma (FcεR1γ) subunit polypeptide.
   284. The nucleic acid or cell of any one of embodiment 222, 226, 237, 252-280, or 282-283, wherein the antigen recognition moiety is a single chain variable fragment.
   285. The nucleic acid or cell of any one of embodiment 222, 226, 237, 252-280, or 282-284, wherein the transmembrane region is a CD8 transmembrane region.
   286. The nucleic acid of any one of embodiments 201-205, 208-225, or 265-285, wherein the nucleic acid is contained within a viral vector.
   287. The nucleic acid of embodiment 286, wherein the viral vector is selected from the group consisting of retroviral vector, murine leukemia virus vector, SFG vector, adenoviral vector, lentiviral vector, adeno-associated virus (AAV), Herpes virus, and Vaccinia virus.
   288. The nucleic acid of any one of embodiments 201-205, 208-225, or 265-287, wherein the nucleic acid is prepared or in a vector designed for electroporation, sonoporation, or biolistics, or is attached to or incorporated in chemical lipids, polymers, inorganic nanoparticles, or polyplexes.
   289. The nucleic acid of any one of embodiments 201-205, 208-225, or 265-285, wherein the nucleic acid is contained within a plasmid.
   290. The nucleic acid or cell of any one of embodiments 201-289, comprising a polynucleotide coding for a polypeptide provided in the tables of Examples 23 or 25.
   291. The nucleic acid or cell of any one of embodiments 201-289, comprising a polynucleotide coding for a polypeptide provided in the tables of Examples 23 or 25 selected from group consisting of FKBPv36, FpK′, FpK, Fv, Fv′, FKBPpK′, FKBPpK″, and FKBPpK′″.
   292. The nucleic acid or cell of any one of embodiments 201-289, comprising a polynucleotide coding for a polypeptide provided in the tables of Examples 23 or 25 selected from group consisting of FRPS-VL, FRPS-VH, FMC63-VL, and FMC63-VH.
   293. The nucleic acid or cell of any one of embodiments 201-289, comprising a polynucleotide coding for FRPS-VL and FRPS-VH.
   294. The nucleic acid or cell of any one of embodiments 201-289, comprising a polynucleotide coding for FMC63-VL and FMC63-VH.
   295. The nucleic acid or cell of any one of embodiments 201-289, comprising a polynucleotide coding for a polypeptide provided in the tables of Examples 23 or 25 selected from group consisting of MyD88L and MyD88.
   296. The nucleic acid or cell of any one of embodiments 201-289, comprising a polynucleotide coding for a ΔCaspase-9 polypeptide provided in the tables of Examples 23 or 25.
   297. The nucleic acid or cell of any one of embodiments 201-289, comprising a polynucleotide coding for a ΔCD18 polypeptide provided in the tables of Examples 23 or 25.
   298. The nucleic acid or cell of any one of embodiments 201-289, comprising a polynucleotide coding for a hCD40 polypeptide provided in the tables of Examples 23 or 25.
   299. The nucleic acid or cell of any one of embodiments 201-289, comprising a polynucleotide coding for a CD3zeta polypeptide provided in the tables of Examples 23 or 25.

### 300. Reserved.

[1084] 301. A method of stimulating an immune response in a subject, comprising:
[1085] a) transplanting modified cells of any one of embodiments 226-238, 252-264, or 265-285 into the subject,
   and
[1086] b) after (a), administering an effective amount of a rapamycin or a rapalog that binds to the FRB or FRB variant region of the chimeric stimulating polypeptide to stimulate a cell mediated immune response.
   302. A method of administering a ligand to a human subject who has undergone cell therapy using modified cells, comprising administering rapamycin or a rapalog to the human subject, wherein the modified cells comprise modified cells of any one of embodiments 226-238, 252-264, or 265-285.
   303. A method of controlling activity of transplanted modified cells in a subject, comprising:
[1087] a) transplanting a modified cell of any one of embodiments 226-238, or 252-285; and
[1088] b) after (a), administering an effective amount of rapamycin or a rapalog that binds to the FRB or FRB variant region of the chimeric stimulating polypeptide to stimulate the activity of the transplanted modified cells.
   304. A method for treating a subject having a disease or condition associated with an elevated expression of a target antigen expressed by a target cell, comprising
[1089] (a) transplanting an effective amount of modified cells into the subject; wherein the modified cells comprise a modified cell of any one of embodiments 226-238, or 252-285, wherein the modified cell comprises a chimeric antigen receptor comprising an antigen recognition moiety that binds to the target antigen, and
[1090] (b) after a), administering an effective amount of rapamycin or a rapalog that binds to the FRB or FRB variant region of the chimeric stimulating polypeptide to reduce the number or concentration of target antigen or target cells in the subject.
   305. The method of embodiment 304, wherein the target antigen is a tumor antigen.
   306. A method for treating a subject having a disease or condition associated with an elevated expression of a target antigen expressed by a target cell, comprising
[1091] (a) administering to the subject an effective amount of modified cells, wherein the modified cells comprise a modified cell of any one of embodiments 226-238, or 252-285, wherein the modified cell comprises a chimeric T cell receptor that recognizes and binds to the target antigen, and
[1092] (b) after a), administering an effective amount of rapamycin or a rapalog that binds to the FRB or FRB variant region of the chimeric stimulating polypeptide to reduce the number or concentration of target antigen or target cells in the subject.
   307. A method for reducing the size of a tumor in a subject, comprising
[1093] a) administering a modified cell of any one of embodiments 226-238, or 252-285 to the subject, wherein the cell comprises a chimeric antigen receptor comprising an antigen recognition moiety that binds to an antigen on the tumor; and
[1094] b) after a), administering an effective amount of rapamycin or a rapalog that binds to the FRB or FRB variant region of the chimeric stimulating polypeptide to reduce the size of the tumor in the subject.
   308. The method of any one of embodiments 304-307, comprising measuring the number or concentration of target cells in a first sample obtained from the subject before administering second ligand, measuring the number or concentration of target cells in a second sample obtained from the subject after administering the ligand, and determining an increase or decrease of the number or concentration of target cells in the second sample compared to the number or concentration of target cells in the first sample.
   309. The method of embodiment 308, wherein the concentration of target cells in the second sample is decreased compared to the concentration of target cells in the first sample.
   310. The method of embodiment 308, wherein the concentration of target cells in the second sample is increased compared to the concentration of target cells in the first sample.
   311. The method of any one of embodiments 301-310, wherein the subject has received a stem cell transplant before or at the same time as administration of the modified cells.
   312. The method of any one of embodiments 301-311, wherein at least 1×10⁶ transduced or transfected modified cells are administered to the subject.
   313. The method of any one of embodiments 301-311, wherein at least 1×10⁷ transduced or transfected modified cells are administered to the subject.
   314. The method of any one of embodiments 301-311, wherein at least 1×10⁸ modified cells are administered to the subject.
   314.1. The method of any one of embodiments 301-314, wherein the FKBP12 variant region is FKBP12v36 and the ligand that binds to the FKBP12 variant region is AP1903.
   315. A method of controlling survival of transplanted modified cells in a subject, comprising
[1095] a) transplanting modified cells of any one of embodiments 226-238, or 252-285 into the subject, and
[1096] b) after (a), administering to the a ligand that binds to the FKBP12 variant region of the chimeric pro-apoptotic polypeptide in an amount effective to kill less than 30% of the modified cells that express the chimeric pro-apoptotic polypeptide.
   316. The method of any one of embodiments 301-314.1, further comprising after (b), administering to the subject a ligand that binds to the FKBP12 variant region of the chimeric pro-apoptotic polypeptide in an amount effective to kill less than 30% of the modified cells that express the chimeric pro-apoptotic polypeptide.
   317. The method of any one of embodiments 315 or 316, wherein the a ligand that binds to the FKBP12 variant region is administered in an amount effective to kill less than 40% of the modified cells that express the chimeric pro-apoptotic polypeptide.
   318. The method of any one of embodiments 315 or 316, wherein the a ligand that binds to the FKBP12 variant region is administered in an amount effective to kill less than 50% of the modified cells that express the chimeric pro-apoptotic polypeptide.
   319. The method of any one of embodiments 315 or 316, wherein the a ligand that binds to the FKBP12 variant region is administered in an amount effective to kill less than 60% of the modified cells that express the chimeric pro-apoptotic polypeptide.
   320. The method of any one of embodiments 315 or 316, wherein the a ligand that binds to the FKBP12 variant region is administered in an amount effective to kill less than 70% of the modified cells that express the chimeric pro-apoptotic polypeptide.
   321. The method of any one of embodiments 315 or 316, wherein the a ligand that binds to the FKBP12 variant region is administered in an amount effective to kill less than 90% of the modified cells that express the chimeric pro-apoptotic polypeptide.
   322. The method of any one of embodiments 315 or 316, wherein the a ligand that binds to the FKBP12 variant region is administered in an amount effective to kill at least 90% of the modified cells that express the chimeric pro-apoptotic polypeptide.
   323. The method of any one of embodiments 315 or 316, wherein the a ligand that binds to the FKBP12 variant region is administered in an amount effective to kill at least 95% of the modified cells that express the chimeric pro-apoptotic polypeptide.
   324. The method of any one of embodiments 315-316, wherein the chimeric costimulating polypeptide comprises a FRB_{L} region.
   325. The method of any one of embodiments 301-314.1, wherein more than one dose of the ligand is administered to the subject.
   326. The method of any one of embodiments 315-325, wherein more than one dose of the a ligand that binds to the FKBP12 variant region is administered to the subject.
   327. The method of any one of embodiments 301-325, further comprising
[1097] identifying a presence or absence of a condition in the subject that requires the removal of the modified cells from the subject; and
[1098] administering a ligand that binds to the FKBP12 variant region, maintaining a subsequent dosage of the ligand, or adjusting a subsequent dosage of the ligand to the subject based on the presence or absence of the condition identified in the subject.
   328. The method of any one of embodiments 301-325, further comprising
   receiving information comprising presence or absence of a condition in the subject that requires the removal of the modified cells from the subject; and
   administering the a ligand that binds to the FKBP12 variant region, maintaining a subsequent dosage of the ligand, or adjusting a subsequent dosage of the ligand to the subject based on the presence or absence of the condition identified in the subject.
   329. The method of any one of embodiments 301-325, further comprising
   identifying a presence or absence of a condition in the subject that requires the removal of the modified cells from the subject; and
   transmitting the presence, absence or stage of the condition identified in the subject to a decision maker who administers a ligand that binds to the FKBP12 variant region, maintains a subsequent dosage of the ligand, or adjusts a subsequent dosage of the ligand administered to the subject based on the presence, absence or stage of the condition identified in the subject.
   330. The method of any one of embodiments 301-325, further comprising
   identifying a presence or absence of a condition in the subject that requires the removal of the modified cells from the subject; and
   transmitting an indication to administer the a ligand that binds to the FKBP12 variant region, maintain a subsequent dosage of the ligand, or adjust a subsequent dosage of the ligand administered to the subject based on the presence, absence or stage of the condition identified in the subject.
   331. The method of any one of embodiments 301-330, wherein the subject has cancer.
   332. The method of any one of embodiments 301-331, wherein the modified cell is delivered to a tumor bed.
   333. The method of any one of embodiments 331 or 332, wherein the cancer is present in the blood or bone marrow of the subject.
   334. The method of any one of embodiments 301-330, wherein the subject has a blood or bone marrow disease.
   335. The method of any one of embodiments 301-330, wherein the subject has been diagnosed with sickle cell anemia or metachromatic leukodystrophy.
   336. The method of any one of embodiments 301-330, wherein the patient has been diagnosed with a condition selected from the group consisting of a primary immune deficiency condition, hemophagocytosis lymphohistiocytosis (HLH) or other hemophagocytic condition, an inherited marrow failure condition, a hemoglobinopathy, a metabolic condition, and an osteoclast condition.
   337. The method of any one of embodiments 301-330, wherein the patient has been diagnosed with a disease or condition selected from the group consisting of Severe Combined Immune Deficiency (SCID), Combined Immune Deficiency (CID), Congenital T-cell Defect/Deficiency, Common Variable Immune Deficiency (CVID), Chronic Granulomatous Disease, IPEX (Immune deficiency, polyendocrinopathy, enteropathy, X-linked) or IPEX-like, Wiskott-Aldrich Syndrome, CD40 Ligand Deficiency, Leukocyte Adhesion Deficiency, DOCA 8 Deficiency, IL-10 Deficiency/IL-10 Receptor Deficiency, GATA 2 deficiency, X-linked lymphoproliferative disease (XLP), Cartilage Hair Hypoplasia, Shwachman Diamond Syndrome, Diamond Blackfan Anemia, Dyskeratosis Congenita, Fanconi Anemia, Congenital Neutropenia, Sickle Cell Disease, Thalassemia, Mucopolysaccharidosis, Sphingolipidoses, and Osteopetrosis.
   338. A method for expressing a chimeric costimulating polypeptide wherein the chimeric costimulating polypeptide comprises
[1099] a) a costimulating polypeptide region comprising
   (i) a MyD88 polypeptide region or a truncated MyD88 polypeptide region lacking the TIR domain; and
   (ii) a CD40 cytoplasmic polypeptide region lacking the CD40 extracellular domain;
[1100] b) a FRB or FRB variant region; and
[1101] c) a FKBP12 polypeptide region.
   comprising contacting a nucleic acid of any one of embodiments 301-306 with a cell under conditions in which the nucleic acid is incorporated into the cell, whereby the cell expresses the first and second chimeric polypeptides from the incorporated nucleic acid.
   339. The method of embodiment 338, wherein the nucleic acid is contacted with the cell ex vivo.
   340 The method of embodiment 338, wherein the nucleic acid is contacted with the cell in vivo.

### Example 34: Additional Representative Embodiments

[1102] 1. A modified cell, comprising
[1103] a) a first polynucleotide encoding a chimeric pro-apoptotic polypeptide, wherein the chimeric pro-apoptotic polypeptide comprises
   [1104] (i) a pro-apoptotic polypeptide region;
   [1105] (ii) a FKBP12-Rapamycin-Binding (FRB) domain polypeptide, or FRB variant polypeptide region; and
   [1106] (iii) a FKBP12 or FKBP12 variant polypeptide region (FKBP12v); and
[1107] b) a second polynucleotide encoding a chimeric costimulating polypeptide, wherein the chimeric costimulating polypeptide comprises two FKBP12 variant polypeptide regions and
   i) a MyD88 polypeptide region or a truncated MyD88 polypeptide region lacking the TIR domain; or
   ii) a MyD88 polypeptide region or a truncated MyD88 polypeptide region lacking the TIR domain, and a CD40 cytoplasmic polypeptide region lacking the CD40 extracellular domain.
   2. The modified cell of claim 1, wherein the chimeric costimulating polypeptide comprises two FKBP12 variant polypeptide regions and a truncated MyD88 polypeptide region lacking the TIR domain.
   3. The modified cell of claim 1, wherein the chimeric costimulating polypeptide comprises two FKBP12 variant polypeptide regions, a truncated MyD88 polypeptide region lacking the TIR domain, and a CD40 cytoplasmic polypeptide region lacking the CD40 extracellular domain.
   4. The modified cell of any of claims 1-3, wherein the chimeric pro-apoptotic polypeptide comprises (i) a pro-apoptotic polypeptide region, (ii) a FRB or FRB variant polypeptide region, and (iii) a FKBP12 polypeptide region.
   5. The modified cell of any one of claims 1-5, wherein the cell further comprises a third polynucleotide encoding a heterologous protein.
   6. The modified cell of claim 6, wherein the heterologous protein is a chimeric antigen receptor.
   7. The modified cell of claim 7, wherein the heterologous protein is a recombinant T cell receptor.
   8. A nucleic acid comprising a promoter operably linked to
[1108] a) a first polynucleotide encoding a chimeric pro-apoptotic polypeptide, wherein the chimeric pro-apoptotic polypeptide comprises
   [1109] (i) a pro-apoptotic polypeptide region;
   [1110] (ii) a FKBP12-Rapamycin-Binding (FRB) domain polypeptide, or FRB variant polypeptide region; and
   [1111] (iii) a FKBP12 or FKBP12 variant polypeptide region (FKBP12v); and
[1112] b) a second polynucleotide encoding a chimeric costimulating polypeptide, wherein the chimeric costimulating polypeptide comprises two FKBP12 variant polypeptide regions and
   i) a MyD88 polypeptide region or a truncated MyD88 polypeptide region lacking the TIR domain; or
   ii) a MyD88 polypeptide region or a truncated MyD88 polypeptide region lacking the TIR domain, and a CD40 cytoplasmic polypeptide region lacking the CD40 extracellular domain.
   9. The nucleic acid of claim 8, wherein the chimeric pro-apoptotic polypeptide comprises a pro-apoptotic polypeptide region, a FRB or FRB variant polypeptide region, and a FKBP12 polypeptide region.
   10. The nucleic acid of any one of claims 8-9, wherein the chimeric costimulating polypeptide comprises a MyD88 polypeptide region or a truncated MyD88 polypeptide region lacking the TIR domain.
   11. The nucleic acid of any one of claims 8-9, wherein the chimeric costimulating polypeptide comprises a truncated MyD88 polypeptide region lacking the TIR domain and a CD40 cytoplasmic polypeptide region lacking the CD40 extracellular domain.
   12. The nucleic acid of any one of claims 8-11, wherein the promoter is operably linked to a third polynucleotide, wherein the third polynucleotide encodes a heterologous protein.
   13. The nucleic acid of claim 12, wherein the heterologous protein is a chimeric antigen receptor.
   14. The nucleic acid of claim 12, wherein the heterologous protein is a recombinant TCR.
   15. The nucleic acid of any one of claims 8-14, wherein the nucleic acid further comprises a polynucleotide encoding a linker polypeptide between the first polynucleotide and the second polynucleotide, wherein the linker polypeptide separates the translation products of the first and second polynucleotides during or after translation.
   16. The nucleic acid of claim 15, wherein the nucleic acid further comprises a polynucleotide encoding a linker polypeptide between the third polynucleotide and the first or the second polynucleotide, wherein the linker polypeptide separates the translation product of the third polynucleotide from the translation products of the first or second polynucleotides during or after translation.
   17. The nucleic acid of any one of claim 15 or 16, wherein the linker polypeptide is a 2A polypeptide.
   18. A modified cell transduced or transfected with a nucleic acid of any one of claims 8-17
   19. The modified cell or the nucleic acid of any one of claims 1-18, wherein the FRB polypeptide or FRB variant polypeptide region and the FKBP12 polypeptide or FKBP12 variant polypeptide region are amino terminal to the pro-apoptotic polypeptide of the chimeric pro-apoptotic polypeptide.
   20. The modified cell or the nucleic acid of claim 19, wherein the FRB polypeptide or FRB variant polypeptide region is amino terminal to the FKBP12 polypeptide or FKBP12 variant polypeptide region.
   21. The modified cell or the nucleic acid of claim 19, wherein the FKBP12 polypeptide or FKBP12 variant polypeptide region is amino terminal to the FRB or FRB variant polypeptide region.
   22. The modified cell or the nucleic acid of any one of claims 1-21, wherein the FKBP12 variant polypeptide region binds to a ligand with at least 100 times more affinity than the ligand binds to the FKBP12 polypeptide region.
   23. The modified cell or the nucleic acid of any one of claims 1-21, wherein the FKBP12 variant polypeptide region binds to a ligand with at least 500 times more affinity than the ligand binds to the FKBP12 polypeptide region.
   24. The modified cell or the nucleic acid of any one of claims 1-21, wherein the FKBP12 variant polypeptide region binds to a ligand with at least 1000 times more affinity than the ligand binds to the wild type FKBP12 polypeptide region.
   25. The modified cell or the nucleic acid of any one of claims 1-24, wherein the FKBP12 variant polypeptide comprises an amino acid substitution at amino acid residue 36.
   26. The modified cell or the nucleic acid of claim 25, wherein the amino acid substitution at position 36 selected from the group consisting of valine, leucine, isoleuceine and alanine.
   27. The modified cell or the nucleic acid of any one of claims 1-21, wherein the FKBP12 variant polypeptide region is a FKBP12v36 polypeptide region.
   28. The modified cell or the nucleic acid of any one of claims 22-24, wherein the ligand is rimiducid.
   29. The modified cell or the nucleic acid of any one of claim 224, wherein the ligand is AP20187 or AP1510.
   30. The modified cell or the nucleic acid of any one of claims 1-29, wherein the FRB variant polypeptide binds to a C7 rapalog.
   31. The modified cell or the nucleic acid of any one of claims 1-30, wherein the FRB variant polypeptide comprises an amino acid substitution at position T2098 or W2101.
   32. The modified cell or the nucleic acid of any one of claims 1-31, wherein the FRB variant polypeptide region is selected from the group consisting of KLW (T2098L)(FRBL), KTF (W2101F), and KLF (T2098L, W2101F).
   33. The modified cell or the nucleic acid of any one of claims 1-32, wherein the FRB variant polypeptide region is FRBL.
   34. The modified cell of any one of claims 1-33, wherein the FRB variant polypeptide region binds to a rapalog selected from the group consisting of S-o,p-dimethoxyphenyl (DMOP)-rapamycin, R-Isopropoxyrapamycin, C7-Isobutyloxyrapamycin, and S-Butanesulfonamidorap.
   35. The modified cell or the nucleic acid of any one of claims 1-34, wherein the cell or the nucleic acid comprises a polynucleotide that encodes a chimeric antigen receptor, wherein the chimeric antigen receptor comprises (i) a transmembrane region, (ii) a T cell activation molecule, and (iii) an antigen recognition moiety.
   36. The modified cell or the nucleic acid of claim 33, wherein the T cell activation molecule is selected from the group consisting of an ITAM-containing, Signal 1 conferring molecule, a Syk polypeptide, a ZAP70 polypeptide, a CD3 ζ polypeptide, and an Fc epsilon receptor gamma (FcεR1γ) subunit polypeptide.
   37. The modified cell or the nucleic acid of claim 33, wherein the T cell activation molecule is selected from the group consisting of an ITAM-containing, Signal 1 conferring molecule, a CD3 ζ polypeptide, and an Fc epsilon receptor gamma (FcεR1γ) subunit polypeptide.
   38. The modified cell or the nucleic acid of any one of claims 35-371, wherein the antigen recognition moiety is a single chain variable fragment.
   39. The modified cell or the nucleic acid of any one of claims 35-38, wherein the transmembrane region is a CD8 transmembrane region.
   40. The modified cell or the nucleic acid of any one of claims 35-39, wherein the antigen recognition moiety binds to an antigen selected from the group consisting of an antigen on a tumor cell, an antigen on a cell involved in a hyperproliferative disease, a viral antigen, a bacterial antigen, CD19, PSCA, Her2/Neu, PSMA, Muc1Muc1, Muc1 ROR1, Mesothelin, GD2, CD123, Muc16, CD33, CD38, and CD44v6.
   41. The modified cell or the nucleic acid of any one of claims 35-40 wherein the antigen recognition moiety binds to an antigen selected from the group consisting of an antigen on a tumor cell, an antigen on a cell involved in a hyperproliferative disease, a viral antigen, a bacterial antigen, CD19, PSCA, Her2/Neu, PSMA, Muc1Muc1, Muc1 ROR1, Mesothelin, GD2, CD123, Muc16, CD33, CD38, and CD44v6.
   42. The modified cell of any one of claims 1-34, wherein the cell comprises a polynucleotide encoding a recombinant T cell receptor, wherein the recombinant T cell receptor binds to an antigenic polypeptide selected from the group consisting of PRAME, Bob-1, and NY-ESO-1.
   43. The modified cell or the nucleic acid of any one of claims 1-42, wherein the pro-apoptotic polypeptide is selected from the group consisting of Caspase 1, 2, 3, 4, 5, 6, 7, 8, 9, 10, 11, 12, 13, or 14, FADD (DED), APAF1 (CARD), CRADD/RAIDD CARD), ASC (CARD), Bax, Bak, Bcl-xL, Bcl-2, RIPK3, and RIPK1-RHIM.
   44. The modified cell or the nucleic acid of any one of claims 1-43, wherein the pro-apoptotic polypeptide is a caspase polypeptide.
   45. The modified cell or the nucleic acid of claim 44, wherein the pro-apoptotic polypeptide is a Caspase-9 polypeptide.
   46. The nucleic acid of cell of claim 45, wherein the Caspase-9 polypeptide lacks the CARD domain.
   47. The modified cell or the nucleic acid of any one of claim 45 or 46, wherein the caspase polypeptide comprises the amino acid sequence of SEQ ID NO: 300.
   48. The modified cell or the nucleic acid of any one of claims 44-47, wherein the caspase polypeptide is a modified Caspase-9 polypeptide comprising an amino acid substitution selected from the group consisting of the catalytically active caspase variants in Tables 5 or 6.
   49. The modified cell or the nucleic acid of claim 48, wherein the caspase polypeptide is a modified Caspase-9 polypeptide comprising an amino acid sequence selected from the group consisting of D330A, D330E, and N405Q.
   50. The modified cell or the nucleic acid of any one of claims 1-49, wherein the truncated MyD88 polypeptide has the amino acid sequence of SEQ ID NO: 214 or 305 969, or a functional fragment thereof.
   51. The modified cell or the nucleic acid of any one of claims 1-49, wherein the MyD88 polypeptide has the amino acid sequence of SEQ ID NO: 282, or a functional fragment thereof.
   52. The modified cell or the nucleic acid of any one of claims 1-51, wherein the cytoplasmic CD40 polypeptide has the amino acid sequence of SEQ ID NO: 216, or a functional fragment thereof.
   53. The modified cell of claim 1, wherein,
   a) the chimeric pro-apoptotic polypeptide comprises a Caspase-9 polypeptide lacking the CARD domain, a FRBL polypeptide region and a FKBP12 polypeptide region; and
   b) the chimeric costimulating polypeptide comprises a truncated MyD88 polypeptide region lacking the TIR domain and two FKBP12v36 polypeptide regions.
   54. The modified cell of claim 1, wherein,
   a) the chimeric pro-apoptotic polypeptide comprises a Caspase-9 polypeptide lacking the CARD domain, a FRBL polypeptide region and a FKBP12 polypeptide region; and
   b) the chimeric costimulating polypeptide comprises a truncated MyD88 polypeptide region lacking the TIR domain, a CD40 cytoplasmic polypeptide region lacking the extracellular domain, and two FKBP12v36 polypeptide regions.
   55. The nucleic acid of claim 19, wherein,
   a) the chimeric pro-apoptotic polypeptide comprises a Caspase-9 polypeptide lacking the CARD domain, a FRBL polypeptide region and a FKBP12 polypeptide region; and
   b) the chimeric costimulating polypeptide comprises a truncated MyD88 polypeptide region lacking the TIR domain and two FKBP12v36 polypeptide regions.
   56. The nucleic acid of claim 19, wherein,
   a) the chimeric pro-apoptotic polypeptide comprises a Caspase-9 polypeptide lacking the CARD domain, a FRBL polypeptide region and a FKBP12 polypeptide region; and
   b) the chimeric costimulating polypeptide comprises a truncated MyD88 polypeptide region lacking the TIR domain, a CD40 cytoplasmic polypeptide region lacking the extracellular domain, and two FKBP12v36 polypeptide regions.
   57. The modified cell of any one of claim 1-8, 18, or 19-36, wherein the cell is a T cell, tumor infiltrating lymphocyte, NK-T cell, or NK cell.
   58. The modified cell of any one of claim 1-8, 18, or 19-36, wherein the cell is a T cell, NK-T cell, or NK cell.
   59. The modified cell of any one of claim 1-8, 18, or 19-36, wherein the cell is a T cell.
   60. The modified cell of any one of claim 1-8, 18, or 19-36, wherein the cell is a primary T cell.
   61. The modified cell of any one of claim 1-8, 18, or 19-36, wherein the cell is a cytotoxic T cell.
   62. The modified cell of any one of claim 1-8, 18, or 19-36, wherein the cell is selected from the group consisting of embryonic stem cell (ESC), inducible pluripotent stem cell (iPSC), non-lymphocytic hematopoietic cell, non-hematopoietic cell, macrophage, keratinocyte, fibroblast, melanoma cell, tumor infiltrating lymphocyte, natural killer cell, natural killer T cell, or T cell.
   63. The modified cell of any one of claim 1-8, 18, or 19-36, wherein the T cell is a helper T cell.
   64. The modified cell of any one of claim 1-8, 18, or 19-36, wherein the cell is obtained or prepared from bone marrow.
   65. The modified cell of any one claim 1-8, 18, or 19-36, wherein the cell is obtained or prepared from umbilical cord blood.
   66. The modified cell of any one of claim 1-8, 18, or 19-36, wherein the cell is obtained or prepared from peripheral blood.
   67. The modified cell of any one of claim 1-8, 18, or 19-36, wherein the cell is obtained or prepared from peripheral blood mononuclear cells.
   68. The modified cell of any one of claim 1-8, 18, 19-36 or 57-67, wherein the cell is a human cell.
   69. The modified cell of any one of claim 1-8, 18, 19-36 or 57-68, wherein the modified cell is transduced or transfected in vivo.
   70. The modified cell of any one of claim 1-8, 18, 19-36 or 57-69, wherein the cell is transfected or transduced by the nucleic acid vector using a method selected from the group consisting of electroporation, sonoporation, biolistics (e.g., Gene Gun with Au-particles), lipid transfection, polymer transfection, nanoparticles, or polyplexes.
   71. A kit or composition comprising nucleic acid comprising
[1113] a) a first polynucleotide encoding a chimeric pro-apoptotic polypeptide, wherein the chimeric pro-apoptotic polypeptide comprises
   [1114] (i) a pro-apoptotic polypeptide region;
   [1115] (ii) a FKBP12-Rapamycin-Binding (FRB) domain polypeptide region, or variant thereof; and
   [1116] (iii) a FKBP12 polypeptide or FKBP12 variant polypeptide region (FKBP12v); and
[1117] b) a second polynucleotide encoding a chimeric costimulating polypeptide, wherein the chimeric costimulating polypeptide comprises two FKBP12 variant polypeptide regions and
   i) a MyD88 polypeptide region or a truncated MyD88 polypeptide region lacking the TIR domain; or
   ii) a MyD88 polypeptide region or a truncated MyD88 polypeptide region lacking the TIR domain, and a CD40 cytoplasmic polypeptide region lacking the CD40 extracellular domain.
   72. The kit or composition of claim 71, wherein the chimeric pro-apoptotic polypeptide comprises a pro-apoptotic polypeptide region, a FRB or FRB variant polypeptide region, and a FKBP12 polypeptide region.
   73. The kit or composition of any one of claims 71-72, wherein the chimeric costimulating polypeptide comprises a MyD88 polypeptide region or a truncated MyD88 polypeptide region lacking the TIR domain.
   74. The kit or composition of any one of claims 71-72, wherein the chimeric costimulating polypeptide comprises a truncated MyD88 polypeptide region lacking the TIR domain and a CD40 cytoplasmic polypeptide region lacking the CD40 extracellular domain.
   75. The kit or composition of claim 71, wherein the nucleic acid is a nucleic acid of any one of claim 8-17, 19-212, or 55-56.
   76. The kit or composition of any one of claims 71-75, further comprising a third polynucleotide, wherein the third polynucleotide encodes a heterologous protein.
   77. The kit or composition of 72, wherein the heterologous protein is a chimeric antigen receptor.
   78. The kit or composition of claim 72, wherein the heterologous protein is a recombinant TCR.
   79. The kit or composition of any one of claims 71-75, comprising a virus, wherein the virus comprises the first and the second polynucleotide.
   80. The kit or composition of any one of claims 72-78, comprising a virus, wherein the virus comprises the first, second, and third polynucleotides.
   81. The kit or composition of any one of claims 72-78, comprising a virus, wherein the virus comprises the first and third polynucleotides.
   82. The kit or composition of any one of claims 72-78, comprising a virus, wherein the virus comprises the second and third polynucleotides.
   83. A method for expressing a chimeric pro-apoptotic polypeptide, wherein the chimeric pro-apoptotic polypeptide comprises
   a) a pro-apoptotic polypeptide region; a FRB polypeptide or FRB variant polypeptide region; and
   b) a FKBP12 polypeptide region,
   comprising contacting a nucleic acid of any one of claim 8-17, 19-52, or 55-56, with a cell under conditions in which the nucleic acid is incorporated into the cell, whereby the cell expresses the chimeric pro-apoptotic polypeptide from the incorporated nucleic acid.
   84. The method of claim 83, wherein the cell further expresses a chimeric costimulating polypeptide, wherein the chimeric costimulating polypeptide comprises
   a) two FKBP12 variant polypeptide regions; and
   b) a MyD88 polypeptide region or a truncated MyD88 polypeptide region lacking the TIR domain, or a MyD88 polypeptide region or a truncated MyD88 polypeptide region lacking the TIR domain and a CD40 cytoplasmic polypeptide region lacking the CD40 extracellular domain.
   85. The method of any one of claim 83 or 84, wherein the nucleic acid is contacted with the cell ex vivo.
   86. The method of any one of claim 83 or 84, wherein the nucleic acid is contacted with the cell in vivo.
   87. A method of stimulating an immune response in a subject, comprising:
[1118] a) transplanting modified cells of any one of claim 1-8, 18, 19-36, or 57-70 into the subject, and
[1119] b) after (a), administering an effective amount of a ligand that binds to the FKBP12 variant polypeptide region of the chimeric costimulating polypeptide to stimulate a cell mediated immune response.
   88. A method of administering a ligand to a subject who has undergone cell therapy using modified cells, comprising administering a ligand that binds to the FKBP variant region of the chimeric costimulating polypeptide to the human subject, wherein the modified cells comprise modified cells of any one of claim 1-8, 18, 19-36, or 57-70.
   89. A method of controlling activity of transplanted modified cells in a subject, comprising:
[1120] a) transplanting a modified cell of any one of claim 1-8, 18, 19-36, or 57-70; and
[1121] b) after (a), administering an effective amount of a ligand that binds to the FKBP12 variant polypeptide region of the chimeric costimulating polypeptide to stimulate the activity of the transplanted modified cells.
   90. A method for treating a subject having a disease or condition associated with an elevated expression of a target antigen expressed by a target cell, comprising
[1122] a) transplanting an effective amount of modified cells into the subject; wherein the modified cells comprise a modified cell of any one of claim 1-8, 18, 19-36, or 57-70, wherein the modified cell comprises a chimeric antigen receptor comprising an antigen recognition moiety that binds to the target antigen, and
[1123] b) after a), administering an effective amount of a ligand that binds to the FKBP12 variant polypeptide region of the chimeric costimulating polypeptide to reduce the number or concentration of target antigen or target cells in the subject.
   91. The method of claim 90, wherein the target antigen is a tumor antigen.
   92. A method for treating a subject having a disease or condition associated with an elevated expression of a target antigen expressed by a target cell, comprising
   a) administering to the subject an effective amount of modified cells, wherein the modified cells comprise a modified cell of any one of claim 1-8, 18, 19-36, or 57-70, wherein the modified cell comprises a recombinant T cell receptor that recognizes and binds to the target antigen, and
   b) after a), administering an effective amount of a ligand that binds to the FKBP12 variant polypeptide region of the chimeric costimulating polypeptide to reduce the number or concentration of target antigen or target cells in the subject.
   93. A method for reducing the size of a tumor in a subject, comprising
   a) administering a modified cell of any one of claim 1-8, 18, 19-36, or 57-70 to the subject, wherein the cell comprises a chimeric antigen receptor comprising an antigen recognition moiety that binds to an antigen on the tumor; and
   b) after a), administering an effective amount of a ligand that binds to the FKBP12 variant polypeptide region of the chimeric costimulating polypeptide to reduce the size of the tumor in the subject.
   94. The method of any one of claims 90-93, comprising measuring the number or concentration of target cells in a first sample obtained from the subject before administering second ligand, measuring the number or concentration of target cells in a second sample obtained from the subject after administering the ligand, and determining an increase or decrease of the number or concentration of target cells in the second sample compared to the number or concentration of target cells in the first sample.
   95. The method of claim 94, wherein the concentration of target cells in the second sample is decreased compared to the concentration of target cells in the first sample.
   96. The method of claim 94, wherein the concentration of target cells in the second sample is increased compared to the concentration of target cells in the first sample.
   97. The method of any one of claims 87-96, wherein the subject has received a stem cell transplant before or at the same time as administration of the modified cells.
   98. The method of any one of claims 87-97, wherein at least 1×106 transduced or transfected modified cells are administered to the subject.
   99. The method of any one of claims 87-97, wherein at least 1×107 transduced or transfected modified cells are administered to the subject.
   100. The method of any one of claims 87-97, wherein at least 1×108 modified cells are administered to the subject.
   101. The method of any one of claims 87-100, wherein the FKBP12 variant polypeptide region is FKBP12v36 and the ligand that binds to the FKBP12 variant polypeptide region is AP1903.
   102. A method of controlling survival of transplanted modified cells in a subject, comprising
   a) transplanting modified cells of any one of claim 1-8, 18, 19-36, or 57-70 into the subject; and
   b) after a), administering to the subject rapamycin or a rapalog that binds to the FRB polypeptide or FRB variant polypeptide region of the chimeric pro-apoptotic polypeptide in an amount effective to kill at least 30% of the modified cells that express the chimeric pro-apoptotic polypeptide.
   103. The method of any one of claims 87-102, further comprising after b), administering to the subject rapamycin or a rapalog that binds to the FRB variant polypeptide region of the chimeric pro-apoptotic polypeptide in an amount effective to kill at least 30% of the modified cells that express the chimeric pro-apoptotic polypeptide.
   104. The method of claim 103, wherein the rapamycin or rapalog is administered in an amount effective to kill at least 40% of the modified cells that express the chimeric pro-apoptotic polypeptide.
   105. The method of any one of claim 102 or 103, wherein the rapamycin or rapalog is administered in an amount effective to kill at least 50% of the modified cells that express the chimeric pro-apoptotic polypeptide.
   106. The method of any one of claim 102 or 103, wherein the rapamycin or rapalog is administered in an amount effective to kill at least 60% of the modified cells that express the chimeric pro-apoptotic polypeptide.
   107. The method of any one of claim 102 or 103, wherein the rapamycin or rapalog is administered in an amount effective to kill at least 70% of the modified cells that express the chimeric pro-apoptotic polypeptide.
   108. The method of any one of claim 102 or 103, wherein the rapamycin or rapalog is administered in an amount effective to kill at least 80% of the modified cells that express the chimeric pro-apoptotic polypeptide.
   109. The method of any one of claim 102 or 103, wherein the rapamycin or rapalog is administered in an amount effective to kill at least 90% of the modified cells that express the chimeric pro-apoptotic polypeptide.
   110. The method of any one of claim 102 or 103, wherein the rapamycin or rapalog is administered in an amount effective to kill at least 95% of the modified cells that express the chimeric pro-apoptotic polypeptide.
   111. The method of any one of claim 102 or 103, wherein the rapamycin or rapalog is administered in an amount effective to kill at least 99% of the modified cells that express the chimeric pro-apoptotic polypeptide.
   112. The method of any one of claims 102-103, wherein the chimeric pro-apoptotic polypeptide comprises a FRBL region.
   113. The method of any one of claims 87-101, wherein more than one dose of the ligand is administered to the subject.
   114. The method of any one of claims 102-113, wherein more than one dose of the rapamycin or rapalog is administered to the subject.
   115. The method of any one of claims 87-113, further comprising
[1124] identifying a presence or absence of a condition in the subject that requires the removal of the modified cells from the subject; and
[1125] administering rapamycin or a rapalog, maintaining a subsequent dosage of rapamycin or the rapalog, or adjusting a subsequent dosage of the rapamycin or the rapalog to the subject based on the presence or absence of the condition identified in the subject.
   116. The method of any one of claims 87-113, further comprising
   receiving information comprising presence or absence of a condition in the subject that requires the removal of the modified cells from the subject; and
   administering the rapamycin or rapalog, maintaining a subsequent dosage of rapamycin or the rapalog, or adjusting a subsequent dosage of rapamycin or the rapalog to the subject based on the presence or absence of the condition identified in the subject.
   117. The method of any one of claims 87-113, further comprising
   identifying a presence or absence of a condition in the subject that requires the removal of the modified cells from the subject; and
   transmitting the presence, absence or stage of the condition identified in the subject to a decision maker who administers rapamycin or the rapalog, maintains a subsequent dosage of the rapamycin or the rapalog, or adjusts a subsequent dosage of the rapamycin or the rapalog administered to the subject based on the presence, absence or stage of the condition identified in the subject.
   118. The method of any one of claims 87-113, further comprising
   identifying a presence or absence of a condition in the subject that requires the removal of the modified cells from the subject; and
   transmitting an indication to administer the rapamycin or the rapalog, maintain a subsequent dosage of the rapamycin or the rapalog, or adjust a subsequent dosage of the rapamycin or the rapalog administered to the subject based on the presence, absence or stage of the condition identified in the subject.
   119. The method of any one of claims 87-118, wherein the subject has cancer.
   120. The method of any one of claims 87-119, wherein the modified cell is delivered to a tumor bed.
   121. The method of any one of claim 119 or 120, wherein the cancer is present in the blood or bone marrow of the subject.
   122. The method of any one of claims 87-118, wherein the subject has a blood or bone marrow disease.
   123. The method of any one of claims 87-118, wherein the subject has been diagnosed with sickle cell anemia or metachromatic leukodystrophy.
   124. The method of any one of claims 87-118, wherein the subject has been diagnosed with a condition selected from the group consisting of a primary immune deficiency condition, hemophagocytosis lymphohistiocytosis (HLH) or other hemophagocytic condition, an inherited marrow failure condition, a hemoglobinopathy, a metabolic condition, and an osteoclast condition.
   125. The method of any one of claims 87-118, wherein the patient has been diagnosed with a disease or condition selected from the group consisting of Severe Combined Immune Deficiency (SCID), Combined Immune Deficiency (CID), Congenital T-cell Defect/Deficiency, Common Variable Immune Deficiency (CVID), Chronic Granulomatous Disease, IPEX (Immune deficiency, polyendocrinopathy, enteropathy, X-linked) or IPEX-like, Wiskott-Aldrich Syndrome, CD40 Ligand Deficiency, Leukocyte Adhesion Deficiency, DOCA 8 Deficiency, IL-10 Deficiency/IL-10 Receptor Deficiency, GATA 2 deficiency, X-linked lymphoproliferative disease

[1126] (XLP), Cartilage Hair Hypoplasia, Shwachman Diamond Syndrome, Diamond Blackfan Anemia, Dyskeratosis Congenita, Fanconi Anemia, Congenital Neutropenia, Sickle Cell Disease, Thalassemia, Mucopolysaccharidosis, Sphingolipidoses, and Osteopetrosis.

126. A modified cell comprising
a) a first polynucleotide encoding a chimeric pro-apoptotic polypeptide, wherein the chimeric pro-apoptotic polypeptide comprises
[1127] i) a pro-apoptotic polypeptide region; and
[1128] ii) a FKBP12 variant polypeptide region; and
   b) a second polynucleotide encoding a chimeric costimulating polypeptide, wherein the chimeric costimulating polypeptide comprises
   i) a FKBP12-Rapamycin Binding (FRB) domain polypeptide or FRB variant polypeptide region;
   ii) a FKBP12 polypeptide or FKBP12 variant polypeptide region; and
   iii) a MyD88 polypeptide region or a truncated MyD88 polypeptide region lacking the TIR domain, or a MyD88 polypeptide region, or a truncated MyD88 polypeptide region lacking the TIR domain and a CD40 cytoplasmic polypeptide region lacking the CD40 extracellular domain.
   127. The modified cell of claim 126, wherein the chimeric costimulating polypeptide comprises a MyD88 polypeptide region or a truncated MyD88 polypeptide region lacking the TIR domain.
   128. The modified cell of claim 126, wherein the chimeric costimulating polypeptide comprises a truncated MyD88 polypeptide region lacking the TIR domain and a CD40 cytoplasmic polypeptide region lacking the CD40 extracellular domain.
   129. The modified cell of any one of claims 126-128, wherein the cell further comprises a third polynucleotide, wherein the third polynucleotide encodes a heterologous protein.
   130. The modified cell of claim 129, wherein the heterologous protein is a chimeric antigen receptor.
   131. The modified cell of claim 129, wherein the heterologous protein is a recombinant TCR.
   132. A nucleic acid comprising a promoter operably linked to
   a) a first polynucleotide encoding a chimeric pro-apoptotic polypeptide, wherein the chimeric pro-apoptotic polypeptide comprises
[1129] i) a pro-apoptotic polypeptide region; and
[1130] ii) a FKBP12 variant polypeptide region; and
   b) a second polynucleotide encoding a chimeric costimulating polypeptide, wherein the chimeric costimulating polypeptide comprises
   i) a FKBP12-Rapamycin Binding (FRB) domain polypeptide or FRB variant polypeptide region;
   ii) a FKBP12 polypeptide region; and
   iii) a MyD88 polypeptide region or a truncated MyD88 polypeptide region lacking the TIR domain, or a MyD88 polypeptide region or a truncated MyD88 polypeptide region lacking the TIR domain and a CD40 cytoplasmic polypeptide region lacking the CD40 extracellular domain.
   133. The nucleic acid of claim 132, wherein the chimeric costimulating polypeptide comprises a MyD88 polypeptide region or a truncated MyD88 polypeptide region lacking the TIR domain.
   134. The nucleic acid of claim 132, wherein the chimeric costimulating polypeptide comprises a truncated MyD88 polypeptide region lacking the TIR domain and a CD40 cytoplasmic polypeptide region lacking the CD40 extracellular domain.
   135. The nucleic acid of any one of claims 132-134, wherein the promoter is operably linked to a third polynucleotide, wherein the third polynucleotide encodes a heterologous protein.
   136. The nucleic acid of claim 135, wherein the heterologous protein is a chimeric antigen receptor.
   137. The nucleic acid of claim 135, wherein the heterologous protein is a recombinant TCR.
   138. The nucleic acid of any one of claims 132-137, wherein the nucleic acid further comprises a polynucleotide encoding a linker polypeptide between the first polynucleotide and the second polynucleotide, wherein the linker polypeptide separates the translation products of the first and second polynucleotides during or after translation.
   139. The nucleic acid of claim 138, wherein the nucleic acid further comprises a polynucleotide encoding a linker polypeptide between the third polynucleotide and the first or the second polynucleotide, wherein the linker polypeptide separates the translation product of the third polynucleotide from the translation products of the first or second polynucleotides during or after translation.
   140. The nucleic acid of any one of claim 138 or 139, wherein the linker polypeptide is a 2A polypeptide.
   141. A modified cell transduced or transfected with a nucleic acid of any one of claims 132-140
   142. The modified cell or the nucleic acid of any one of claims 126-141, wherein the FRB polypeptide or FRB variant polypeptide region and the FKBP12 polypeptide region are amino terminal to the MyD88 polypeptide or truncated MyD88 polypeptide of the chimeric costimulating polypeptide.
   143. The modified cell or the nucleic acid of claim 142, wherein the FRB polypeptide or FRB variant polypeptide region is amino terminal to the FKBP12 polypeptide region.
   144. The modified cell or the nucleic acid of claim 142, wherein the FKBP12 polypeptide region is amino terminal to the FRB or FRB variant polypeptide region.
   145. The modified cell or the nucleic acid of any one of claims 126-144, wherein the FKBP12 variant polypeptide region binds to a ligand with at least 100 times more affinity than the ligand binds to the FKBP12 polypeptide region.
   146. The modified cell or the nucleic acid of any one of claims 126-144, wherein the FKBP12 variant polypeptide region binds to a ligand with at least 500 times more affinity than the ligand binds to the FKBP12 polypeptide region.
   147. The modified cell or the nucleic acid of any one of claims 126-144, wherein the FKBP12 variant polypeptide region binds to a ligand with at least 1000 times more affinity than the ligand binds to the FKBP12 polypeptide region.
   148. The modified cell or the nucleic acid of any one of claims 126-147, wherein the FKBP12 variant polypeptide comprises an amino acid substitution at amino acid residue 36.
   149. The modified cell or the nucleic acid of claim 148, wherein the amino acid substitution at position 36 selected from the group consisting of valine, leucine, isoleuceine and alanine.
   150. The modified cell or the nucleic acid of any one of claims 126-144, wherein the FKBP12 variant polypeptide region is a FKBP12v36 polypeptide region.
   151. The modified cell of any one of claims 145-147, wherein the ligand is rimiducid.
   152. The modified cell of any one of claims 145-147, wherein the ligand is AP20187.
   153 The modified cell of any one of claims 126-152, wherein the FRB variant polypeptide binds to a C7 rapalog.
   154. The modified cell of any one of claims 126-153, wherein the FRB variant polypeptide comprises an amino acid substitution at position T2098 or W2101.
   155. The modified cell of any one of claims 126-154, wherein the FRB variant polypeptide region is selected from the group consisting of KLW (T2098L)(FRBL), KTF (W2101F), and KLF (T2098L, W2101F).
   156. The modified cell of any one of claims 126-155, wherein the FRB variant polypeptide region is FRBL.
   157. The modified cell of any one of claims 126-156, wherein the FRB variant polypeptide region binds to a rapalog selected from the group consisting of S-o,p-dimethoxyphenyl (DMOP)-rapamycin, R-Isopropoxyrapamycin, C7-Isobutyloxyrapamycin, and S-Butanesulfonamidorap.
   158. The modified cell or the nucleic acid of any one of claims 126-157, wherein the cell or the nucleic acid comprises a polynucleotide that encodes a chimeric antigen receptor, wherein the chimeric antigen receptor comprises (i) a transmembrane region, (ii) a T cell activation molecule, and (iii) an antigen recognition moiety.
   159. The modified cell or the nucleic acid of claim 158, wherein the T cell activation molecule is selected from the group consisting of an ITAM-containing, Signal 1 conferring molecule, a Syk polypeptide, a ZAP70 polypeptide, a CD3 ζ polypeptide, and an Fc epsilon receptor gamma (FcεR1γ) subunit polypeptide.
   160. The modified cell or the nucleic acid of any one of claim 158 or 159, wherein the antigen recognition moiety is a single chain variable fragment.
   161. The modified cell or the nucleic acid of any one of claims 158-160, wherein the transmembrane region is a CD8 transmembrane region.
   162. The modified cell or the nucleic acid of any one of claims 158-161, wherein the antigen recognition moiety binds to an antigen selected from the group consisting of an antigen on a tumor cell, an antigen on a cell involved in a hyperproliferative disease, a viral antigen, a bacterial antigen, CD19, PSCA, Her2/Neu, PSMA, Muc1Muc1, Muc1 ROR1, Mesothelin, GD2, CD123, Muc16, CD33, CD38, and CD44v6.
   163. The modified cell or the nucleic acid of any one of claims 158-162 wherein the antigen recognition moiety binds to an antigen selected from the group consisting of an antigen on a tumor cell, an antigen on a cell involved in a hyperproliferative disease, a viral antigen, a bacterial antigen, CD19, PSCA, Her2/Neu, PSMA, Muc1Muc1, Muc1 ROR1, Mesothelin, GD2, CD123, Muc16, CD33, CD38, and CD44v6.
   164. The modified cell or the nucleic acid of any one of claims 126-157, wherein the cell comprises a polynucleotide encoding a recombinant T cell receptor, wherein the recombinant T cell receptor binds to an antigenic polypeptide selected from the group consisting of PRAME, Bob-1, and NY-ESO-1.
   165. The modified cell or the nucleic acid of any one of claims 126-164, wherein the pro-apoptotic polypeptide is selected from the group consisting of caspase 1, 2, 3, 4, 5, 6, 7, 8, 9, 10, 11, 12, 13, or 14, FADD (DED), APAF1 (CARD), CRADD/RAIDD CARD), ASC (CARD), Bax, Bak, Bcl-xL, Bcl-2, RIPK3, and RIPK1-RHIM.
   166. The modified cell or the nucleic acid of any one of claims 126-165, wherein the pro-apoptotic polypeptide is a caspase polypeptide.
   167. The modified cell or the nucleic acid of claim 166, wherein the pro-apoptotic polypeptide is a Caspase-9 polypeptide.
   168. The nucleic acid of cell of claim 167, wherein the Caspase-9 polypeptide lacks the CARD domain.
   169. The modified cell or the nucleic acid of any one of claim 167 or 168, wherein the caspase polypeptide comprises the amino acid sequence of SEQ ID NO: 300.
   170. The modified cell or the nucleic acid of any one of claims 166-168, wherein the caspase polypeptide is a modified Caspase-9 polypeptide comprising an amino acid substitution selected from the group consisting of the catalytically active caspase variants in Tables 5 or 6.
   171. The modified cell or the nucleic acid of claim 170, wherein the caspase polypeptide is a modified Caspase-9 polypeptide comprising an amino acid sequence selected from the group consisting of D330A, D330E, and N405Q.
   172. The modified cell or the nucleic acid of any one of claims 126-171, wherein the truncated MyD88 polypeptide has the amino acid sequence of SEQ ID NO: 214 or 969, or a functional fragment thereof.
   173. The modified cell or the nucleic acid of any one of claims 126-171, wherein the MyD88 polypeptide has the amino acid sequence of SEQ ID NO: 282, or a functional fragment thereof.
   174. The modified cell or the nucleic acid of any one of claims 126-173, wherein the cytoplasmic CD40 polypeptide has the amino acid sequence of SEQ ID NO: 216, or a functional fragment thereof.
   175. The modified cell of claim 126, wherein,
   a) the chimeric pro-apoptotic polypeptide comprises a Caspase-9 polypeptide lacking the CARD domain and a FKBP12v36 polypeptide region; and
   b) the chimeric costimulating polypeptide comprises a truncated MyD88 polypeptide region lacking the TIR domain and a FRBL polypeptide region and a FKBP12 polypeptide region.
   176. The modified cell of claim 126, wherein,
   a) the chimeric pro-apoptotic polypeptide comprises a Caspase-9 polypeptide lacking the CARD domain and a FKBP12v36 polypeptide region; and
   b) the chimeric costimulating polypeptide comprises a truncated MyD88 polypeptide region lacking the TIR domain, a CD40 cytoplasmic polypeptide region lacking the extracellular domain, a FRBL polypeptide region and a FKBP12 polypeptide region.
   177. The nucleic acid of claim 142, wherein,
   a) the chimeric pro-apoptotic polypeptide comprises a Caspase-9 polypeptide lacking the CARD domain and a FKBP12v36 polypeptide region; and
   b) the chimeric costimulating polypeptide comprises a truncated MyD88 polypeptide region lacking the TIR domain and a FRBL polypeptide region and a FKBP12 polypeptide region.
   178. The nucleic acid of claim 142, wherein,
   a) the chimeric pro-apoptotic polypeptide comprises a Caspase-9 polypeptide lacking the CARD domain and a FKBP12v36 polypeptide region; and
   b) the chimeric costimulating polypeptide comprises a truncated MyD88 polypeptide region lacking the TIR domain, a CD40 cytoplasmic polypeptide region lacking the extracellular domain, a FRBL polypeptide region and a FKBP12 polypeptide region.
   179. The modified cell of any one of claim 126-131, 141, or 142-176, wherein the cell is a T cell, tumor infiltrating lymphocyte, NK-T cell, or NK cell.
   180. The modified cell of any one of claim 126-131 or 141-176, wherein the cell is a T cell, NK-T cell, or NK cell.
   181. The modified cell of any one of claim 126-131 or 141-176, wherein the cell is a T cell.
   182. The modified cell of any one of claim 126-131 or 141-176, wherein the cell is a primary T cell.
   183. The modified cell of any one of claim 126-131 or 141-176, wherein the cell is a cytotoxic T cell.
   184. The modified cell of any one of claim 126-131 or 141-176, wherein the cell is selected from the group consisting of embryonic stem cell (ESC), inducible pluripotent stem cell (iPSC), non-lymphocytic hematopoietic cell, non-hematopoietic cell, macrophage, keratinocyte, fibroblast, melanoma cell, tumor infiltrating lymphocyte, natural killer cell, natural killer T cell, or T cell.
   185. The modified cell of any one of claim 126-131 or 141-176, wherein the T cell is a helper T cell.
   186. The modified cell of any one of claim 126-131 or 141-176, wherein the cell is obtained or prepared from bone marrow.
   187. The modified cell of any one claim 126-131 or 141-176, wherein the cell is obtained or prepared from umbilical cord blood.
   188. The modified cell of any one of claim 126-131 or 141-176, wherein the cell is obtained or prepared from peripheral blood.
   189. The modified cell of any one of claim 126-131 or 141-176, wherein the cell is obtained or prepared from peripheral blood mononuclear cells.
   190. The modified cell of any one of claim 126-131 or 141-176, wherein the cell is a human cell.
   191. The modified cell of any one of claim 126-131, 141-176 or 179-190, wherein the modified cell is transduced or transfected in vivo.
   192. The modified cell of any one of claim 126-131, 141-174 or 179-190, wherein the cell is transfected or transduced by the nucleic acid vector using a method selected from the group consisting of electroporation, sonoporation, biolistics (e.g., Gene Gun with Au-particles), lipid transfection, polymer transfection, nanoparticles, or polyplexes.
   193. A kit or composition comprising nucleic acid comprising
   a) a first polynucleotide encoding a chimeric pro-apoptotic polypeptide, wherein the chimeric pro-apoptotic polypeptide comprises
[1131] i) a pro-apoptotic polypeptide region; and
[1132] ii) a FKBP12 variant polypeptide region; and
   b) a second polynucleotide encoding a chimeric costimulating polypeptide, wherein the chimeric costimulating polypeptide comprises
   i) a FRB polypeptide or FRB variant polypeptide region;
   ii) a FKBP12 polypeptide region; and
   iii) a MyD88 polypeptide region or a truncated MyD88 polypeptide region lacking the TIR domain, or a MyD88 polypeptide region or a truncated MyD88 polypeptide region lacking the TIR domain and a CD40 cytoplasmic polypeptide region lacking the CD40 extracellular domain.
   194. The kit or composition of claim 193, wherein the chimeric costimulating polypeptide comprises a MyD88 polypeptide region or a truncated MyD88 polypeptide region lacking the TIR domain.
   195. The kit or composition of any one of claims 193-194, wherein the chimeric costimulating polypeptide comprises a truncated MyD88 polypeptide region lacking the TIR domain and a CD40 cytoplasmic polypeptide region lacking the CD40 extracellular domain.
   196. The kit or composition of any one of claims 193-195, further comprising a third polynucleotide, wherein the third polynucleotide encodes a heterologous protein.
   197. The kit or composition of claim 196, wherein the heterologous protein is a chimeric antigen receptor.
   198. The kit or composition of claim 196, wherein the heterologous protein is a recombinant TCR.
   199. The kit or composition of claim 193, wherein the nucleic acid is a nucleic acid of any one of claim 132-139, 142-174, or 177-178.
   200. The kit or composition of any one of claims 193-199, further comprising a third polynucleotide, wherein the third polynucleotide encodes a heterologous protein.
   201. The kit or composition of 200, wherein the heterologous protein is a chimeric antigen receptor.
   202. The kit or composition of claim 200, wherein the heterologous protein is a recombinant TCR.
   203. The kit or composition of any one of claims 194-199, comprising a virus, wherein the virus comprises the first and the second polynucleotide.
   204. The kit or composition of any one of claims 199-202, comprising a virus, wherein the virus comprises the first, second, and third polynucleotides.
   205. The kit or composition of any one of claims 200-202, comprising a virus, wherein the virus comprises the first and third polynucleotides.
   206. The kit or composition of any one of claims 200-202, comprising a virus, wherein the virus comprises the second and third polynucleotides.
   207. The kit or composition of any one of claims 200-202, comprising a virus, wherein the virus comprises the first, second, and third polynucleotides.
   208. A method for expressing a chimeric pro-apoptotic polypeptide and a chimeric costimulating polypeptide, wherein
   a) the chimeric pro-apoptotic polypeptide comprises
[1133] i) a pro-apoptotic polypeptide region; and
[1134] ii) a FKBP12 variant polypeptide region; and
   b) the chimeric costimulating polypeptide comprises
   i) a FRB or FRB variant polypeptide region;
   j) a FKBP12 polypeptide region; and
   k) a MyD88 polypeptide region or a truncated MyD88 polypeptide region lacking the TIR domain, or a MyD88 polypeptide region or a truncated MyD88 polypeptide region lacking the TIR domain and a CD40 cytoplasmic polypeptide region lacking the CD40 extracellular domain. comprising contacting a nucleic acid of any one of claim 132-139, 142-174, or 177-178 with a cell under conditions in which the nucleic acid is incorporated into the cell, whereby the cell expresses the chimeric pro-apoptotic polypeptide and the chimeric costimulating polypeptide from the incorporated nucleic acid.
   209. The method of claim 208, wherein the nucleic acid is contacted with the cell ex vivo.
   210. The method of claim 208, wherein the nucleic acid is contacted with the cell in vivo.
   211. A method of stimulating an immune response in a subject, comprising:
[1135] a) transplanting modified cells of any one of claim 126-131, 141-176, or 179-192 into the subject, and
[1136] b) after (a), administering an effective amount of a rapamycin or a rapalog that binds to the FRB polypeptide or FRB variant polypeptide region of the chimeric stimulating polypeptide to stimulate a cell mediated immune response.
   212. A method of administering a ligand to a subject who has undergone cell therapy using modified cells, comprising administering rapamycin or a rapalog to the subject, wherein the modified cells comprise modified cells of any one of claim 126-131, 141-176, or 179-192.
   213. A method of controlling activity of transplanted modified cells in a subject, comprising:
[1137] a) transplanting a modified cell of any one of claim 126-131, 141-176, or 179-192; and
[1138] b) after (a), administering an effective amount of rapamycin or a rapalog that binds to the FRB or FRB variant polypeptide region of the chimeric stimulating polypeptide to stimulate the activity of the transplanted modified cells.
   214. A method for treating a subject having a disease or condition associated with an elevated expression of a target antigen expressed by a target cell, comprising
   a) transplanting an effective amount of modified cells into the subject; wherein the modified cells comprise a modified cell of any one of claim 126-131, 141-176, or 179-192, wherein the modified cell comprises a chimeric antigen receptor comprising an antigen recognition moiety that binds to the target antigen, and
   b) after a), administering an effective amount of rapamycin or a rapalog that binds to the FRB polypeptide or FRB variant region of the chimeric stimulating polypeptide to reduce the number or concentration of target antigen or target cells in the subject.
   215. The method of claim 214, wherein the target antigen is a tumor antigen.
   216. A method for treating a subject having a disease or condition associated with an elevated expression of a target antigen expressed by a target cell, comprising
   a) administering to the subject an effective amount of modified cells, wherein the modified cells comprise a modified cell of any one of claim 126-131, 141-176, or 179-192, wherein the modified cell comprises a recombinant T cell receptor that recognizes and binds to the target antigen, and
   b) after a), administering an effective amount of rapamycin or a rapalog that binds to the FRB or FRB variant polypeptide region of the chimeric stimulating polypeptide to reduce the number or concentration of target antigen or target cells in the subject.
   217. A method for reducing the size of a tumor in a subject, comprising
   a) administering a modified cell of any one of claim 126-131, 141-176, or 179-192 to the subject, wherein the cell comprises a chimeric antigen receptor comprising an antigen recognition moiety that binds to an antigen on the tumor; and
   b) after a), administering an effective amount of rapamycin or a rapalog that binds to the FRB or FRB variant polypeptide region of the chimeric stimulating polypeptide to reduce the size of the tumor in the subject.
   218. The method of any one of claims 214-217, comprising measuring the number or concentration of target cells in a first sample obtained from the subject before administering second ligand, measuring the number or concentration of target cells in a second sample obtained from the subject after administering the ligand, and determining an increase or decrease of the number or concentration of target cells in the second sample compared to the number or concentration of target cells in the first sample.
   219. The method of claim 218, wherein the concentration of target cells in the second sample is decreased compared to the concentration of target cells in the first sample.
   220. The method of claim 218, wherein the concentration of target cells in the second sample is increased compared to the concentration of target cells in the first sample.
   221. The method of any one of claims 211-220, wherein the subject has received a stem cell transplant before or at the same time as administration of the modified cells.
   222. The method of any one of claims 211-221, wherein at least 1×106 transduced or transfected modified cells are administered to the subject.
   223. The method of any one of claims 211-221, wherein at least 1×107 transduced or transfected modified cells are administered to the subject.
   224. The method of any one of claims 211-221, wherein at least 1×108 modified cells are administered to the subject.
   225. The method of any one of claims 211-224, wherein the FKBP12 variant polypeptide region is FKBP12v36 and the ligand that binds to the FKBP12 variant polypeptide region is AP1903.
   226. A method of controlling survival of transplanted modified cells in a subject, comprising
   a) transplanting modified cells of any one of claim 126-131, 141-176, or 179-192 into the subject, and
   b) after (a), administering to the subject a ligand that binds to the FKBP12 variant polypeptide region of the chimeric pro-apoptotic polypeptide in an amount effective to kill less than 95% of the modified cells that express the chimeric pro-apoptotic polypeptide.
   227. The method of any one of claims 211-225, further comprising after (b), administering to the subject a ligand that binds to the FKBP12 variant polypeptide region of the chimeric pro-apoptotic polypeptide in an amount effective to kill less than 95% of the modified cells that express the chimeric pro-apoptotic polypeptide.
   228. The method of any one of claim 226 or 227, wherein a ligand that binds to the FKBP12 variant polypeptide region is administered in an amount effective to kill less than 40% of the modified cells that express the chimeric pro-apoptotic polypeptide.
   229. The method of any one of claim 226 or 227, wherein a ligand that binds to the FKBP12 variant polypeptide region is administered in an amount effective to kill less than 50% of the modified cells that express the chimeric pro-apoptotic polypeptide.
   230. The method of any one of claim 226 or 227, wherein the a ligand that binds to the FKBP12 variant polypeptide region is administered in an amount effective to kill less than 60% of the modified cells that express the chimeric pro-apoptotic polypeptide.
   231. The method of any one of claim 226 or 227, wherein the a ligand that binds to the FKBP12 variant polypeptide region is administered in an amount effective to kill less than 70% of the modified cells that express the chimeric pro-apoptotic polypeptide.
   232. The method of any one of claim 226 or 227, wherein the a ligand that binds to the FKBP12 variant polypeptide region is administered in an amount effective to kill less than 90% of the modified cells that express the chimeric pro-apoptotic polypeptide.
   233. The method of any one of claim 226 or 227, wherein the a ligand that binds to the FKBP12 variant polypeptide region is administered in an amount effective to kill at least 90% of the modified cells that express the chimeric pro-apoptotic polypeptide.
   234. The method of any one of claim 226 or 227, wherein the a ligand that binds to the FKBP12 variant polypeptide region is administered in an amount effective to kill at least 95% of the modified cells that express the chimeric pro-apoptotic polypeptide.
   235. The method of any one of claims 226-227, wherein the chimeric costimulating polypeptide comprises a FRBL region.
   236. The method of any one of claims 221-225, wherein more than one dose of the ligand is administered to the subject.
   237. The method of any one of claims 226-236, wherein more than one dose of the ligand that binds to the FKBP12 variant polypeptide region is administered to the subject.
   238. The method of any one of claims 211-236, further comprising
[1139] identifying a presence or absence of a condition in the subject that requires the removal of the modified cells from the subject; and
[1140] administering a ligand that binds to the FKBP12 variant polypeptide region, maintaining a subsequent dosage of the ligand, or adjusting a subsequent dosage of the ligand to the subject based on the presence or absence of the condition identified in the subject.
   239. The method of any one of claims 211-236, further comprising
   receiving information comprising presence or absence of a condition in the subject that requires the removal of the modified cells from the subject; and
   administering the a ligand that binds to the FKBP12 variant polypeptide region, maintaining a subsequent dosage of the ligand, or adjusting a subsequent dosage of the ligand to the subject based on the presence or absence of the condition identified in the subject.
   240. The method of any one of claims 211-236, further comprising
   identifying a presence or absence of a condition in the subject that requires the removal of the modified cells from the subject; and
   transmitting the presence, absence or stage of the condition identified in the subject to a decision maker who administers a ligand that binds to the FKBP12 variant polypeptide region, maintains a subsequent dosage of the ligand, or adjusts a subsequent dosage of the ligand administered to the subject based on the presence, absence or stage of the condition identified in the subject.
   241. The method of any one of claims 211-236, further comprising
   identifying a presence or absence of a condition in the subject that requires the removal of the modified cells from the subject; and
   transmitting an indication to administer the a ligand that binds to the FKBP12 variant polypeptide region, maintain a subsequent dosage of the ligand, or adjust a subsequent dosage of the ligand administered to the subject based on the presence, absence or stage of the condition identified in the subject.
   242. The method of any one of claims 211-241, wherein the subject has cancer.
   243. The method of any one of claims 211-241, wherein the modified cell is delivered to a tumor bed.
   244. The method of any one of claim 242 or 243, wherein the cancer is present in the blood or bone marrow of the subject.
   245. The method of any one of claims 211-241, wherein the subject has a blood or bone marrow disease.
   246. The method of any one of claims 211-241, wherein the subject has been diagnosed with sickle cell anemia or metachromatic leukodystrophy.
   247. The method of any one of claims 211-241, wherein the patient has been diagnosed with a condition selected from the group consisting of a primary immune deficiency condition, hemophagocytosis lymphohistiocytosis (HLH) or other hemophagocytic condition, an inherited marrow failure condition, a hemoglobinopathy, a metabolic condition, and an osteoclast condition.
   248. The method of any one of claims 211-241, wherein the patient has been diagnosed with a disease or condition selected from the group consisting of Severe Combined Immune Deficiency (SCID), Combined Immune Deficiency (CID), Congenital T-cell Defect/Deficiency, Common Variable Immune Deficiency (CVID), Chronic Granulomatous Disease, IPEX (Immune deficiency, polyendocrinopathy, enteropathy, X-linked) or IPEX-like, Wiskott-Aldrich Syndrome, CD40 Ligand Deficiency, Leukocyte Adhesion Deficiency, DOCA 8 Deficiency, IL-10 Deficiency/IL-10 Receptor Deficiency, GATA 2 deficiency, X-linked lymphoproliferative disease (XLP), Cartilage Hair Hypoplasia, Shwachman Diamond Syndrome, Diamond Blackfan Anemia, Dyskeratosis Congenita, Fanconi Anemia, Congenital Neutropenia, Sickle Cell Disease, Thalassemia, Mucopolysaccharidosis, Sphingolipidoses, and Osteopetrosis.
   249. A nucleic acid comprising a promoter operably linked to a polynucleotide coding for a chimeric pro-apoptotic polypeptide, wherein the chimeric pro-apoptotic polypeptide comprises
   a) a pro-apoptotic polypeptide region;
   b) a FKBP12-Rapamycin binding domain (FRB) polypeptide or FRB variant polypeptide region; and
   c) a FKBP12 variant polypeptide region.
   250. The nucleic acid of claim 249, wherein the order of regions (a), (b), and (c), from the amino terminus to the carboxyl terminus of the chimeric pro-apoptotic polypeptide is (c), (b), (a).
   251. The nucleic acid of claim 249, wherein the order of regions (a), (b), and (c), from the amino terminus to the carboxyl terminus of the chimeric pro-apoptotic polypeptide is (b), (c), (a).
   252. The nucleic acid of any one of claim 250 or 251, wherein (b) and (c) are amino terminal to the pro-apoptotic polypeptide.
   253. The nucleic acid of any one of claim 250 or 251, wherein (b) and (c) are carboxyl terminal to the pro-apoptotic polypeptide.
   254. The nucleic acid of any one of claims 259 to 253, wherein the chimeric pro-apoptotic polypeptide further comprises linker polypeptides between regions (a), (b), and (c).
   255. The nucleic acid of any one of claims 249-254, wherein the FKBP12 variant polypeptide region binds to a ligand with at least 100 times more affinity than the ligand binds to a wild type FKBP12 polypeptide region.
   256. The nucleic acid of any one of claims 249-254, wherein the FKBP12 variant polypeptide region binds to a ligand with at least 500 times more affinity than the ligand binds to the a wild type FKBP12 polypeptide region.
   257. The nucleic acid of any one of claims 249-254, wherein the FKBP12 variant polypeptide region binds to a ligand with at least 1000 times more affinity than the ligand binds to a wild type FKBP12 polypeptide region.
   258. The nucleic acid of any one of claims 249-257, wherein the FKBP12 variant comprises an amino acid substitution at amino acid residue 36.
   259. The nucleic acid of claim 258, wherein the amino acid substitution at position 36 selected from the group consisting of valine, leucine, isoleuceine and alanine.
   260. The nucleic acid of any one of claims 249-259, wherein the FKBP12 variant polypeptide region is a FKBP12v36 polypeptide region.
   261. The nucleic acid of any one of claims 255-260, wherein the ligand is rimiducid.
   262. The nucleic acid of any one of claims 255-260, wherein the ligand is AP20187 or N1510.
   263 The nucleic acid of any one of claims 249-262, wherein the FRB variant polypeptide binds to a C7 rapalog.
   264. The nucleic acid of any one of claims 249-263, wherein the FRB variant polypeptide comprises an amino acid substitution at position T2098 or W2101.
   265. The nucleic acid of any one of claims 249-264, wherein the FRB variant polypeptide region is selected from the group consisting of KLW (T2098L) (FRBL), KTF (W2101F), and KLF (T2098L, W2101F).
   266. The nucleic acid of any one of claims 249-265, wherein the FRB variant polypeptide region is FRBL.
   267. The nucleic acid of any one of claims 249-266, wherein the FRB variant polypeptide region binds to a rapalog selected from the group consisting of S-o,p-dimethoxyphenyl (DMOP)-rapamycin, R-Isopropoxyrapamycin, C7-Isobutyloxyrapamycin, and S-Butanesulfonamidorap.
   268. The nucleic acid of any one of claims 249-267, wherein the promoter is operably linked to a second polynucleotide, wherein the second polynucleotide encodes a heterologous protein.
   269. The nucleic acid of claim 268, wherein the heterologous protein is a chimeric antigen receptor.
   270. The nucleic acid of claim 268, wherein the heterologous protein is a recombinant TCR.
   271. The nucleic acid of any one of claims 249-268, wherein the nucleic acid further comprises a polynucleotide encoding a linker polypeptide between the polynucleotide that encodes the chimeric pro-apoptotic polypeptide and the second polynucleotide, wherein the linker polypeptide separates the translation products of the first and second polynucleotides during or after translation.
   272. The nucleic acid of claim 271, wherein the linker polypeptide is a 2A polypeptide.
   273. The nucleic acid of any one of claim 269, or 271-272, wherein the chimeric antigen receptor comprises (i) a transmembrane region, (ii) a T cell activation molecule, and (iii) an antigen recognition moiety.
   274 The nucleic acid of claim 273, wherein the T cell activation molecule is selected from the group consisting of an ITAM-containing, Signal 1 conferring molecule, a Syk polypeptide, a ZAP70 polypeptide, a CD3 ζ polypeptide, and an Fc epsilon receptor gamma (FcεR1γ) subunit polypeptide.
   275 The nucleic acid of claim 273, wherein the T cell activation molecule is selected from the group consisting of an ITAM-containing, Signal 1 conferring molecule, a CD3 ζ polypeptide, and an Fc epsilon receptor gamma (FcεR1γ) subunit polypeptide.N23.
   276. The nucleic acid of any one of claims 273-275, wherein the antigen recognition moiety is a single chain variable fragment.
   277. The nucleic acid of any one of claims 273-276, wherein the transmembrane region is a CD8 transmembrane region.
   278. The nucleic acid of any one of claims 273-277, wherein the antigen recognition moiety binds to an antigen selected from the group consisting of an antigen on a tumor cell, an antigen on a cell involved in a hyperproliferative disease, a viral antigen, a bacterial antigen, CD19, PSCA, Her2/Neu, PSMA, Muc1Muc1, Muc1 ROR1, Mesothelin, GD2, CD123, Muc16, CD33, CD38, and CD44v6.
   279. The nucleic acid of any one of claims 273-277 wherein the antigen recognition moiety binds to an antigen selected from the group consisting of an antigen on a tumor cell, an antigen on a cell involved in a hyperproliferative disease, a viral antigen, a bacterial antigen, CD19, PSCA, Her2/Neu, PSMA, Muc1Muc1, Muc1 ROR1, Mesothelin, GD2, CD123, Muc16, CD33, CD38, and CD44v6.
   280. The nucleic acid of any one of claims 270-272, wherein the recombinant T cell receptor binds to an antigenic polypeptide selected from the group consisting of PRAME, Bob-1, and NY-ESO-1.
   281. The nucleic acid of any one of claims 249-280, further comprising a polynucleotide encoding a chimeric costimulatory polypeptide comprising a MyD88 polypeptide region or a truncated MyD88 polypeptide region lacking the TIR domain.
   282. The nucleic acid of claim 281, wherein the chimeric costimulatory polypeptide further comprises a CD40 cytoplasmic polypeptide lacking the CD40 extracellular domain.
   283. The nucleic acid of any one of claims 281-282, wherein the chimeric costimulatory polypeptide further comprises a membrane targeting region.
   284. The nucleic acid of claim 283, wherein the membrane targeting region comprises a myristoylation region.
   285. The nucleic acid of any one of claims 282-284, wherein the truncated MyD88 polypeptide has the amino acid sequence of SEQ ID NO: 214 or 969, or a functional fragment thereof.
   286. The nucleic acid of any one of claims 282-284, wherein the MyD88 polypeptide has the amino acid sequence of SEQ ID NO: 282, or a functional fragment thereof.
   287. The nucleic acid of any one of claims 282-286, wherein the cytoplasmic CD40 polypeptide has the amino acid sequence of SEQ ID NO: 216, or a functional fragment thereof.
   288. The nucleic acid of any one of claims 249-287, wherein the pro-apoptotic polypeptide is selected from the group consisting of Caspase 1, 2, 3, 4, 5, 6, 7, 8, 9, 10, 11, 12, 13, or 14, FADD (DED), APAF1 (CARD), CRADD/RAIDD CARD), ASC (CARD), Bax, Bak, Bcl-xL, Bcl-2, RIPK3, and RIPK1-RHIM.
   289. The nucleic acid of any one of claims 249-288, wherein the pro-apoptotic polypeptide is a caspase polypeptide.
   290. The nucleic acid of claim 289, wherein the pro-apoptotic polypeptide is a Caspase-9 polypeptide.
   291. The nucleic acid of cell of claim 290, wherein the Caspase-9 polypeptide lacks the CARD domain.
   292. The nucleic acid of any one of claim 289 or 290, wherein the caspase polypeptide comprises the amino acid sequence of SEQ ID NO: 300.
   293. The nucleic acid of any one of claims 289-290, wherein the caspase polypeptide is a modified Caspase-9 polypeptide comprising an amino acid substitution selected from the group consisting of the catalytically active caspase variants in Tables 5 or 6.
   294. The nucleic acid of claim 294, wherein the caspase polypeptide is a modified Caspase-9 polypeptide comprising an amino acid sequence selected from the group consisting of D330A, D330E, and N405Q.
   295. The nucleic acid of any one of claims 249-294, wherein, the chimeric pro-apoptotic polypeptide comprises a Caspase-9 polypeptide lacking the CARD domain, a FKBP12v36 polypeptide region; and a FRBL polypeptide region.
   296. A chimeric pro-apoptotic polypeptide encoded by a nucleic acid of any one of claims 249-295.
   297. A modified cell transfected or transduced with a nucleic acid of any one of claims 249-295.
   298. The modified cell of claim 297, wherein the modified cell comprises a polynucleotide that encodes a chimeric antigen receptor.
   299. The modified cell of claim 297, wherein the modified cell comprises a polynucleotide that encodes a recombinant TCR.
   300. The modified cell of claim 298, wherein the chimeric antigen receptor comprises (i) a transmembrane region, (ii) a T cell activation molecule, and (iii) an antigen recognition moiety.
   301. The modified cell of claim 300, wherein the T cell activation molecule is selected from the group consisting of an ITAM-containing, Signal 1 conferring molecule, a Syk polypeptide, a ZAP70 polypeptide, a CD3 ζ polypeptide, and an Fc epsilon receptor gamma (FcεR1γ) subunit polypeptide.
   302. The modified cell of claim 300, wherein the T cell activation molecule is selected from the group consisting of an ITAM-containing, Signal 1 conferring molecule, a CD3 ζ polypeptide, and an Fc epsilon receptor gamma (FcεR1γ) subunit polypeptide.P6.
   303. The modified cell of any one of claims 300-302, wherein the antigen recognition moiety is a single chain variable fragment.
   304. The modified cell of any one of claims 300-303, wherein the transmembrane region is a CD8 transmembrane region.
   305. The modified cell of any one of claims 300-304, wherein the antigen recognition moiety binds to an antigen selected from the group consisting of an antigen on a tumor cell, an antigen on a cell involved in a hyperproliferative disease, a viral antigen, a bacterial antigen, CD19, PSCA, Her2/Neu, PSMA, Muc1Muc1, Muc1 ROR1, Mesothelin, GD2, CD123, Muc16, CD33, CD38, and CD44v6.
   306. The modified cell of any one of claims 300-304 wherein the antigen recognition moiety binds to an antigen selected from the group consisting of an antigen on a tumor cell, an antigen on a cell involved in a hyperproliferative disease, a viral antigen, a bacterial antigen, CD19, PSCA, Her2/Neu, PSMA, Muc1Muc1, Muc1 ROR1, Mesothelin, GD2, CD123, Muc16, CD33, CD38, and CD44v6.
   307. The modified cell of claim 299, wherein the recombinant T cell receptor binds to an antigenic polypeptide selected from the group consisting of PRAME, Bob-1, and NY-ESO-1.
   308. The modified cell of claim 297, wherein the modified cell comprises a polynucleotide that encodes a MyD88 polypeptide or a truncated MyD88 polypeptide region lacking the TIR domain.
   309. The modified cell of claim 308, wherein the modified cell comprises a polynucleotide that encodes a chimeric costimulating polypeptide, wherein the chimeric costimulating polypeptide encodes a MyD88 polypeptide or a truncated MyD88 polypeptide region lacking the TIR domain and a CD40 cytoplasmic polypeptide lacking the CD40 extracellular domain.
   310. The modified cell of any one of claims 308-309, wherein the truncated MyD88 polypeptide has the amino acid sequence of SEQ ID NO: 214 or 969, or a functional fragment thereof.
   311. The modified cell of any one of claims 308-310, wherein the MyD88 polypeptide has the amino acid sequence of SEQ ID NO: 282, or a functional fragment thereof.
   312. The modified cell of any one of claims 309-311, wherein the cytoplasmic CD40 polypeptide has the amino acid sequence of SEQ ID NO: 216, or a functional fragment thereof.
   313. The modified cell of any one of claims 297-312, wherein the cell is a T cell, tumor infiltrating lymphocyte, NK-T cell, or NK cell.
   314. The modified cell of any one of claims 297-312, wherein the cell is a T cell, NK-T cell, or NK cell.
   315. The modified cell of any one of claims 297-312, wherein the cell is a T cell.
   316. The modified cell of any one of claims 297-312, wherein the cell is a primary T cell.
   317. The modified cell of any one of claims 297-312, wherein the cell is a cytotoxic T cell.
   318. The modified cell of any one of claims 297-312, wherein the cell is selected from the group consisting of embryonic stem cell (ESC), inducible pluripotent stem cell (iPSC), non-lymphocytic hematopoietic cell, non-hematopoietic cell, macrophage, keratinocyte, fibroblast, melanoma cell, tumor infiltrating lymphocyte, natural killer cell, natural killer T cell, or T cell.
   319. The modified cell of any one of claims 297-312, wherein the T cell is a helper T cell.
   320. The modified cell of any one of claims 297-312, wherein the cell is obtained or prepared from bone marrow.
   321. The modified cell of any one claims 297-312, wherein the cell is obtained or prepared from umbilical cord blood.
   322. The modified cell of any one of claims 297-312, wherein the cell is obtained or prepared from peripheral blood.
   323. The modified cell of any one of claims 297-312, wherein the cell is obtained or prepared from peripheral blood mononuclear cells.
   324. The modified cell of any one of claims 297-323, wherein the cell is a human cell.
   325. The modified cell of any one of claims 297-324, wherein the modified cell is transduced or transfected in vivo.
   326. The modified cell of any one of claims 297-325, wherein the cell is transfected or transduced by the nucleic acid vector using a method selected from the group consisting of electroporation, sonoporation, biolistics (e.g., Gene Gun with Au-particles), lipid transfection, polymer transfection, nanoparticles, or polyplexes.
   327. A kit or composition comprising nucleic acid comprising a polynucleotide coding for a chimeric pro-apoptotic polypeptide, wherein the chimeric pro-apoptotic polypeptide comprises
   a) a pro-apoptotic polypeptide region;
   b) a FKBP12-Rapamycin binding domain (FRB) polypeptide or FRB variant polypeptide region; and
   c) a FKBP12 variant polypeptide region.
   328. The kit or composition of claim 327, wherein the FKBP12 variant comprises an amino acid substitution at amino acid residue 36.
   329. The kit or composition of claim 328, wherein the amino acid substitution at position 36 selected from the group consisting of valine, leucine, isoleuceine and alanine.
   330. The kit or composition of any one of claims 327-329, wherein the FKBP12 variant polypeptide region is a FKBP12v36 polypeptide region.
   331. The kit or composition of any one of claims 327-330, wherein the FKBP12 variant polypeptide region binds to rimiducid.
   332. The kit or composition of any one of claims 327-331, wherein the FKBP12 variant polypeptide region binds to AP20187 of AP1510.
   333 The kit or composition of any one of claims 327-332, wherein the FRB variant polypeptide binds to a C7 rapalog.
   334. The kit or composition of any one of claims 327-333, wherein the FRB variant polypeptide comprises an amino acid substitution at position T2098 or W2101.
   335. The kit or composition of any one of claims 327-334, wherein the FRB variant polypeptide region is selected from the group consisting of KLW (T2098L) (FRBL), KTF (W2101F), and KLF (T2098L, W2101F).
   336. The kit or composition of any one of claims 327-335, wherein the FRB variant polypeptide region is FRBL.
   337 The kit or composition of any one of claims 327-336, wherein the FRB variant polypeptide region binds to a rapalog selected from the group consisting of S-o,p-dimethoxyphenyl (DMOP)-rapamycin, R-Isopropoxyrapamycin, C7-Isobutyloxyrapamycin, and S-Butanesulfonamidorap.
   338. The kit or composition of any one of claims 327-337, wherein the nucleic acid is a nucleic acid of any one of claims 249-N41.
   339. A method for expressing a chimeric pro-apoptotic polypeptide, wherein the chimeric pro-apoptotic polypeptide comprises
   a) a pro-apoptotic polypeptide region;
   b) a FRB or FRB variant polypeptide region; and
   c) a FKBP12 variant polypeptide region.
   comprising contacting a nucleic acid of any one of claims 249-295 with a cell under conditions in which the nucleic acid is incorporated into the cell, whereby the cell expresses the chimeric pro-apoptotic polypeptide and the chimeric costimulating polypeptide from the incorporated nucleic acid.
   340. The method of claim 339, wherein the nucleic acid is contacted with the cell ex vivo.
   341. The method of claim 339, wherein the nucleic acid is contacted with the cell in vivo.
   342. A method of controlling survival of transplanted modified cells in a subject, comprising:
   a) transplanting modified cells of any one of claims 297 to 326 into the subject; and
   b) after (a), administering to the subject
   i) a first ligand that binds to the FRB or FRB variant polypeptide region of the chimeric pro-apoptotic polypeptide; or
   ii) a second ligand that binds to the FKBP12 variant polypeptide region of the chimeric pro-apoptotic polypeptide
   wherein the first ligand or the second ligand are administered in an amount effective to kill at least 30% of the modified cells that express the chimeric pro-apoptotic polypeptide.
   343. The method of claim 342, wherein the first ligand or the second ligand are administered in an amount effective to kill at least 40% of the modified cells that express the chimeric pro-apoptotic polypeptide.
   344. The method of claim 342, wherein the first ligand or the second ligand are administered in an amount effective to kill at least 50% of the modified cells that express the chimeric pro-apoptotic polypeptide.
   345. The method of claim 342, wherein the first ligand or the second ligand are administered in an amount effective to kill at least 60% of the modified cells that express the chimeric pro-apoptotic polypeptide.
   346. The method of claim 342, wherein the first ligand or the second ligand are administered in an amount effective to kill at least 70% of the modified cells that express the chimeric pro-apoptotic polypeptide.
   347. The method of claim 342, wherein the first ligand or the second ligand are administered in an amount effective to kill at least 80% of the modified cells that express the chimeric pro-apoptotic polypeptide.
   348. The method of claim 342, wherein the first ligand or the second ligand are administered in an amount effective to kill at least 90% of the modified cells that express the chimeric pro-apoptotic polypeptide.
   349. The method of claim 342, wherein the first ligand or the second ligand are administered in an amount effective to kill at least 95% of the modified cells that express the chimeric pro-apoptotic polypeptide.
   350. The method of claim 342, wherein the first ligand or the second ligand are administered in an amount effective to kill at least 99% of the modified cells that express the chimeric pro-apoptotic polypeptide.
   351. A method of administering a first ligand or a second ligand to a subject who has undergone cell therapy using modified cells that express a chimeric pro-apoptotic polypeptide, wherein the modified cells comprise a nucleic acid of any one of claims 249-N45, wherein the first ligand or the second ligand is administered in an amount effective to kill at least 30% of the modified cells that express the chimeric pro-apoptotic polypeptide.
   352. The method of claim 351, wherein the first ligand binds to the FRB or FRB variant polypeptide region and the second ligand binds to the FKBP12 variant polypeptide region of the chimeric pro-apoptotic polypeptide.
   353. The method of any one of claims 351-352, wherein the first ligand or the second ligand are administered in an amount effective to kill less at least 40% of the modified cells that express the chimeric pro-apoptotic polypeptide.
   354. The method of any one of claims 351-352, wherein the first ligand or the second ligand are administered in an amount effective to kill less at least 50% of the modified cells that express the chimeric pro-apoptotic polypeptide.
   355. The method of any one of claims 351-352, wherein the first ligand or the second ligand are administered in an amount effective to kill less at least 60% of the modified cells that express the chimeric pro-apoptotic polypeptide.
   356. The method of any one of claims 351-352, wherein the first ligand or the second ligand are administered in an amount effective to kill less at least 70% of the modified cells that express the chimeric pro-apoptotic polypeptide.
   357.The method of any one of claims 351-352, wherein the first ligand or the second ligand are administered in an amount effective to kill less at least 80% of the modified cells that express the chimeric pro-apoptotic polypeptide.
   358. The method of any one of claims 351-352, wherein the first ligand or the second ligand are administered in an amount effective to kill at least 90% of the modified cells that express the chimeric pro-apoptotic polypeptide.
   359. The method of any one of claims 351-352, wherein the first ligand or the second ligand are administered in an amount effective to kill at least 95% of the modified cells that express the chimeric pro-apoptotic polypeptide.
   360. The method of any one of claims 351-352, wherein the first ligand or the second ligand are administered in an amount effective to kill at least 99% of the modified cells that express the chimeric pro-apoptotic polypeptide.
   361. The method of any one of claims 342-360, wherein more than one dose of the ligand is administered to the subject.
   362. The method of any one of claims 342-361, wherein the first ligand is rapamycin or a rapalog.
   363. The method of claim 362, wherein the first ligand is a rapalog selected from the group consisting of S-o,p-dimethoxyphenyl (DMOP)-rapamycin, R-Isopropoxyrapamycin, C7-Isobutyloxyrapamycin, and S-Butanesulfonamidorap.
   364. The method of any one of claims 342-360, wherein the second ligand is rimiducid, AP20187, or AP1510.
   365. The method of claim 364, wherein the second ligand is rimiducid.
   366. The method of any one of claims 342-365, wherein more than one dose of the first ligand or the second ligand is administered.
   367. The method of any one of claims 342-366, wherein both the first ligand and the second ligand are administered.
   368. The method of any one of claims 342-367, further comprising
[1141] identifying a presence or absence of a condition in the subject that requires the removal of modified cells from the subject; and
[1142] administering the first or the second ligand, or maintaining a subsequent dosage of the first or the second ligand, or adjusting a subsequent dosage of the first or second ligand to the subject based on the presence or absence of the condition identified in the subject.
   369. The method of any one of claims 342-367, further comprising
   identifying a presence or absence of a condition in the subject that requires the removal of transfected or transduced therapeutic cells from the subject; and determining whether the first or the second ligand should be administered to the subject, or the dosage of the first or the second ligand subsequently administered to the subject is adjusted based on the presence or absence of the condition identified in the subject.
   370. The method of any one of claims 342-369, further comprising
   receiving information comprising presence or absence of a condition in the subject that requires the removal of transfected or transduced modified cells from the subject; and
   administering the first ligand or the second ligand, maintaining a subsequent dosage of the first ligand or the second ligand, or adjusting a subsequent dosage of the first ligand or the second ligand to the subject based on the presence or absence of the condition identified in the subject.
   371. The method of any one of claims 342-369, further comprising
   identifying a presence or absence of a condition in the subject that requires the removal of transfected or transduced modified cells from the subject; and
   transmitting the presence, absence or stage of the condition identified in the subject to a decision maker who administers the first ligand or the second ligand, maintains a subsequent dosage of the first ligand or the second ligand, or adjusts a subsequent dosage of the first ligand or the second ligand administered to the subject based on the presence, absence or stage of the condition identified in the subject.
   372. The method of any one of claims 342-39, further comprising
   identifying a presence or absence of a condition in the subject that requires the removal of transfected or transduced modified cells from the subject; and
   transmitting an indication to administer the first ligand or the second ligand, maintain a subsequent dosage of the first ligand or the second ligand, or adjusts a subsequent dosage of the first ligand or the second ligand administered to the subject based on the presence, absence or stage of the condition identified in the subject.
   373. The method of any one of claims 342-369, wherein alloreactive modified cells are present in the subject and the number of alloreactive modified cells is reduced by at least 90% after administration of the first ligand or the second ligand.
   374. The method of any one of claims 342-369, wherein at least 1×106 transduced or transfected modified cells are administered to the subject.
   375. The method of any one of claims 342-373, wherein at least 1×107 transduced or transfected modified cells are administered to the subject.
   376. The method of any one of claims 342-373, wherein at least 1×108 transduced or transfected modified cells are administered to the subject.
   377. The method of any one of claims 342-373, further comprising
[1143] identifying the presence, absence or stage of graft versus host disease in the subject, and
[1144] administering the first ligand or the second ligand, maintaining a subsequent dosage of the first ligand or the second ligand, or adjusting a subsequent dosage of the first ligand or the second ligand to the subject based on the presence, absence or stage of the graft versus host disease identified in the subject.
   378. A method of administering a ligand to a subject who has undergone cell therapy using modified cells comprising administering the ligand to the subject, wherein the modified cells comprise a modified cell of any one of claims 297-326, wherein the ligand binds to a FKBP12 variant polypeptide region.
   379. A method of administering rapamycin or a rapalog to a subject who has undergone cell therapy using modified cells comprising administering rapamycin or a rapalog to the subject, wherein the modified cells comprise a modified cell of any one of claims 297-326, wherein the rapamycin or rapalog binds to a FRB polypeptide or FRB variant polypeptide region.
   380. The method of claim 378, wherein the ligand is selected from the group consisting of rapamycin, AP20187, and AP1510.
   381. The method of any one of claims 342-179, wherein at least 30% of cells expressing the chimeric pro-apoptotic polypeptide are killed within 24 hours of administering the first ligand or the second ligand.
   382. The method of claim 381, wherein at least 40% of cells expressing the chimeric pro-apoptotic polypeptide are killed within 24 hours of administering the first ligand or the second ligand.
   383. The method of claim 381, wherein at least 50% of cells expressing the chimeric pro-apoptotic polypeptide are killed within 24 hours of administering the first ligand or the second ligand.
   384. The method of claim 381, wherein at least 60% of cells expressing the chimeric pro-apoptotic polypeptide are killed within 24 hours of administering the first ligand or the second ligand.
   385. The method of claim 381, wherein at least 70% of cells expressing the chimeric pro-apoptotic polypeptide are killed within 24 hours of administering the first ligand or the second ligand.
   386. The method of claim 381, wherein at least 80% of cells expressing the chimeric pro-apoptotic polypeptide are killed within 24 hours of administering the first ligand or the second ligand.
   387. The method of claim 381, wherein at least 90% of cells expressing the chimeric pro-apoptotic polypeptide are killed within 24 hours of administering the first ligand or the second ligand.
   388. The method of claim 381, wherein at least 95% of cells expressing the chimeric pro-apoptotic polypeptide are killed within 24 hours of administering the first ligand or the second ligand.
   389. The method of any one of claims 381-388, wherein at least 30%, at last 40%, at least 50%, at least 60%, at least 70%, at least 80%, at least 90% or at least 95% of cells expressing the chimeric pro-apoptotic polypeptide are killed within 90 minutes of administering the first ligand or the second ligand.
   390. The method of any one of claims 342-389, wherein
[1145] a) the first ligand is administered to the subject, followed by the second ligand, or
[1146] b) the second ligand is administered to the subject, followed by the first ligand.
   391. The method of any one of claims 342-390, wherein the subject is human.
   392. The method of any one of claims 342-391, wherein the subject is selected from the group consisting of non-human primate, mouse, pig, cow, goat, rabbit, rat, guinea pig, hamster, horse, monkey, sheep, bird, and fish.

[1147] The entirety of each patent, patent application, publication and document referenced herein hereby is incorporated by reference. Citation of the above patents, patent applications, publications and documents is not an admission that any of the foregoing is pertinent prior art, nor does it constitute any admission as to the contents or date of these publications or documents.

[1148] Modifications may be made to the foregoing without departing from the basic aspects of the technology. Although the technology has been described in substantial detail with reference to one or more specific embodiments, those of ordinary skill in the art will recognize that changes may be made to the embodiments specifically disclosed in this application, yet these modifications and improvements are within the scope and spirit of the technology.

[1149] The technology illustratively described herein suitably may be practiced in the absence of any element(s) not specifically disclosed herein. Thus, for example, in each instance herein any of the terms “comprising,” “consisting essentially of,” and “consisting of” may be replaced with either of the other two terms. The terms and expressions which have been employed are used as terms of description and not of limitation, and use of such terms and expressions do not exclude any equivalents of the features shown and described or portions thereof, and various modifications are possible within the scope of the technology claimed. The term “a” or “an” can refer to one of or a plurality of the elements it modifies (e.g., “a reagent” can mean one or more reagents) unless it is contextually clear either one of the elements or more than one of the elements is described. The term “about” as used herein refers to a value within 10% of the underlying parameter (i.e., plus or minus 10%), and use of the term “about” at the beginning of a string of values modifies each of the values (i.e., “about 1, 2 and 3” refers to about 1, about 2 and about 3). For example, a weight of “about 100 grams” can include weights between 90 grams and 110 grams. Further, when a listing of values is described herein (e.g., about 50%, 60%, 70%, 80%, 85% or 86%) the listing includes all intermediate and fractional values thereof (e.g., 54%, 85.4%). Thus, it should be understood that although the present technology has been specifically disclosed by representative embodiments and optional features, modification and variation of the concepts herein disclosed may be resorted to by those skilled in the art, and such modifications and variations are considered within the scope of this technology.

[1150] Certain embodiments of the technology are set forth in the claim(s) that follow(s).

What is claimed is:

1. A modified cell, comprising
a) a first polynucleotide encoding a chimeric pro-apoptotic polypeptide, wherein the chimeric pro-apoptotic polypeptide comprises
(i) a pro-apoptotic polypeptide region;
(ii) a FKBP12-Rapamycin-Binding (FRB) domain polypeptide, or FRB variant polypeptide region; and
(iii) a FKBP12 or FKBP12 variant polypeptide region (FKBP12v); and
b) a second polynucleotide encoding a chimeric costimulating polypeptide, wherein the chimeric costimulating polypeptide comprises two FKBP12 variant polypeptide regions and
i) a MyD88 polypeptide region or a truncated MyD88 polypeptide region lacking the TIR domain; or
ii) a MyD88 polypeptide region or a truncated MyD88 polypeptide region lacking the TIR domain, and a CD40 cytoplasmic polypeptide region lacking the CD40 extracellular domain.

2. The modified cell of claim 1, wherein the chimeric costimulating polypeptide comprises two FKBP12 variant polypeptide regions, a truncated MyD88 polypeptide region lacking the TIR domain, and a CD40 cytoplasmic polypeptide region lacking the CD40 extracellular domain.

3. The modified cell of claim 1, wherein the cell further comprises a third polynucleotide encoding a chimeric antigen receptor or a recombinant T cell receptor.

4. A nucleic acid comprising a promoter operably linked to
a) a first polynucleotide encoding a chimeric pro-apoptotic polypeptide, wherein the chimeric pro-apoptotic polypeptide comprises
(i) a pro-apoptotic polypeptide region;
(ii) a FKBP12-Rapamycin-Binding (FRB) domain polypeptide, or FRB variant polypeptide region; and
(iii) a FKBP12 or FKBP12 variant polypeptide region (FKBP12v); and
b) a second polynucleotide encoding a chimeric costimulating polypeptide, wherein the chimeric costimulating polypeptide comprises two FKBP12 variant polypeptide regions and
i) a MyD88 polypeptide region or a truncated MyD88 polypeptide region lacking the TIR domain; or
ii) a MyD88 polypeptide region or a truncated MyD88 polypeptide region lacking the TIR domain, and a CD40 cytoplasmic polypeptide region lacking the CD40 extracellular domain.

5. The nucleic acid of claim 4, wherein the chimeric costimulating polypeptide comprises a truncated MyD88 polypeptide region lacking the TIR domain and a CD40 cytoplasmic polypeptide region lacking the CD40 extracellular domain.

6. The nucleic acid of claim 4, wherein the promoter is operably linked to a third polynucleotide, wherein the third polynucleotide encodes a chimeric antigen receptor or a recombinant T cell receptor.

7. The nucleic acid of claim 4, wherein the pro-apoptotic polypeptide is a Caspase-9 polypeptide, wherein the Caspase-9 polypeptide lacks the CARD domain.

8. The modified cell of claim 1, wherein the cell is a T cell, tumor infiltrating lymphocyte, NK-T cell, or NK cell.

9. A kit or composition comprising a viral vector comprising nucleic acid comprising
a) a first polynucleotide encoding a chimeric pro-apoptotic polypeptide, wherein the chimeric pro-apoptotic polypeptide comprises
(i) a pro-apoptotic polypeptide region;
(ii) a FKBP12-Rapamycin-Binding (FRB) domain polypeptide region, or variant thereof; and
(iii) a FKBP12 polypeptide or FKBP12 variant polypeptide region (FKBP12v); and
b) a second polynucleotide encoding a chimeric costimulating polypeptide, wherein the chimeric costimulating polypeptide comprises two FKBP12 variant polypeptide regions and
i) a MyD88 polypeptide region or a truncated MyD88 polypeptide region lacking the TIR domain; or
ii) a MyD88 polypeptide region or a truncated MyD88 polypeptide region lacking the TIR domain, and a CD40 cytoplasmic polypeptide region lacking the CD40 extracellular domain.

10. A method for expressing a chimeric pro-apoptotic polypeptide, wherein the chimeric pro-apoptotic polypeptide comprises
a) a pro-apoptotic polypeptide region; a FRB polypeptide or FRB variant polypeptide region; and
b) a FKBP12 polypeptide region,
comprising contacting a nucleic acid of claim 4 with a cell under conditions in which the nucleic acid is incorporated into the cell, whereby the cell expresses the chimeric pro-apoptotic polypeptide from the incorporated nucleic acid.

11. A method of stimulating an immune response in a subject, comprising:
a) transplanting modified cells of claim 1 into the subject, and
b) after (a), administering an effective amount of a ligand that binds to the FKBP12 variant polypeptide region of the chimeric costimulating polypeptide to stimulate a cell mediated immune response.

12. A method of administering a ligand to a subject who has undergone cell therapy using modified cells, comprising administering a ligand that binds to the FKBP variant region of the chimeric costimulating polypeptide to the human subject, wherein the modified cells comprise modified cells of claim 1.

13. A method for treating a subject having a disease or condition associated with an elevated expression of a target antigen expressed by a target cell, comprising
a) transplanting an effective amount of modified cells into the subject; wherein the modified cells comprise a modified cell of claim 1, wherein the modified cell comprises a chimeric antigen receptor or a recombinant T cell receptor comprising an antigen recognition moiety that binds to the target antigen, and
b) after a), administering an effective amount of a ligand that binds to the FKBP12 variant polypeptide region of the chimeric costimulating polypeptide to reduce the number or concentration of target antigen or target cells in the subject.

14. A method for reducing the size of a tumor in a subject, comprising
a) administering a modified cell of claim 1 to the subject, wherein the cell comprises a chimeric antigen receptor or a recombinant T cell receptor comprising an antigen recognition moiety that binds to an antigen on the tumor; and
b) after a), administering an effective amount of a ligand that binds to the FKBP12 variant polypeptide region of the chimeric costimulating polypeptide to reduce the size of the tumor in the subject.

15. A method of controlling survival of transplanted modified cells in a subject, comprising
a) transplanting modified cells of claim 1 into the subject; and
b) after a), administering to the subject rapamycin or a rapalog that binds to the FRB polypeptide or FRB variant polypeptide region of the chimeric pro-apoptotic polypeptide in an amount effective to kill at least 30% of the modified cells that express the chimeric pro-apoptotic polypeptide.

16. A modified cell comprising
a) a first polynucleotide encoding a chimeric pro-apoptotic polypeptide, wherein the chimeric pro-apoptotic polypeptide comprises
i) a pro-apoptotic polypeptide region; and
ii) a FKBP12 variant polypeptide region; and
b) a second polynucleotide encoding a chimeric costimulating polypeptide, wherein the chimeric costimulating polypeptide comprises
i) a FKBP12-Rapamycin Binding (FRB) domain polypeptide or FRB variant polypeptide region;
ii) a FKBP12 polypeptide or FKBP12 variant polypeptide region; and
iii) a MyD88 polypeptide region or a truncated MyD88 polypeptide region lacking the TIR domain, or a MyD88 polypeptide region, or a truncated MyD88 polypeptide region lacking the TIR domain and a CD40 cytoplasmic polypeptide region lacking the CD40 extracellular domain.

17. The modified cell of claim 16, wherein the chimeric costimulating polypeptide comprises a truncated MyD88 polypeptide region lacking the TIR domain and a CD40 cytoplasmic polypeptide region lacking the CD40 extracellular domain.

18. The modified cell of claim 16, wherein the cell further comprises a third polynucleotide, wherein the third polynucleotide encodes a chimeric antigen receptor or a recombinant T cell receptor.

19. A nucleic acid comprising a promoter operably linked to
a) a first polynucleotide encoding a chimeric pro-apoptotic polypeptide, wherein the chimeric pro-apoptotic polypeptide comprises
i) a pro-apoptotic polypeptide region; and
ii) a FKBP12 variant polypeptide region; and
b) a second polynucleotide encoding a chimeric costimulating polypeptide, wherein the chimeric costimulating polypeptide comprises
i) a FKBP12-Rapamycin Binding (FRB) domain polypeptide or FRB variant polypeptide region;
ii) a FKBP12 polypeptide region; and
iii) a MyD88 polypeptide region or a truncated MyD88 polypeptide region lacking the TIR domain, or a MyD88 polypeptide region or a truncated MyD88 polypeptide region lacking the TIR domain and a CD40 cytoplasmic polypeptide region lacking the CD40 extracellular domain.

20. The nucleic acid of claim 19, wherein the chimeric costimulating polypeptide comprises a truncated MyD88 polypeptide region lacking the TIR domain and a CD40 cytoplasmic polypeptide region lacking the CD40 extracellular domain.

21. The nucleic acid of claim 19, wherein the promoter is operably linked to a third polynucleotide, wherein the third polynucleotide encodes chimeric antigen receptor or a recombinant T cell receptor.

22. The nucleic acid of claim 19, wherein the pro-apoptotic polypeptide is a Caspase-9 polypeptide, wherein the Caspase-9 polypeptide lacks the CARD domain.

23. The modified cell of claim 16, wherein the cell is a T cell, tumor infiltrating lymphocyte, NK-T cell, or NK cell.

24. A kit or composition comprising a viral vector comprising nucleic acid comprising
a) a first polynucleotide encoding a chimeric pro-apoptotic polypeptide, wherein the chimeric pro-apoptotic polypeptide comprises
i) a pro-apoptotic polypeptide region; and
ii) a FKBP12 variant polypeptide region; and
b) a second polynucleotide encoding a chimeric costimulating polypeptide, wherein the chimeric costimulating polypeptide comprises
i) a FRB polypeptide or FRB variant polypeptide region;
ii) a FKBP12 polypeptide region; and
iii) a MyD88 polypeptide region or a truncated MyD88 polypeptide region lacking the TIR domain, or a MyD88 polypeptide region or a truncated MyD88 polypeptide region lacking the TIR domain and a CD40 cytoplasmic polypeptide region lacking the CD40 extracellular domain.

25. A method for expressing a chimeric pro-apoptotic polypeptide and a chimeric costimulating polypeptide, wherein
a) the chimeric pro-apoptotic polypeptide comprises
I) a pro-apoptotic polypeptide region; and
ii) a FKBP12 variant polypeptide region; and
b) the chimeric costimulating polypeptide comprises
i) a FRB or FRB variant polypeptide region;
ii) a FKBP12 polypeptide region; and
III) a MyD88 polypeptide region or a truncated MyD88 polypeptide region lacking the TIR domain, or a MyD88 polypeptide region or a truncated MyD88 polypeptide region lacking the TIR domain and a CD40 cytoplasmic
polypeptide region lacking the CD40 extracellular domain comprising contacting a nucleic acid of claim 19 with a cell under conditions in which the nucleic acid is incorporated into the cell, whereby the cell expresses the chimeric pro-apoptotic polypeptide and the chimeric costimulating polypeptide from the incorporated nucleic acid.

26. A method of stimulating an immune response in a subject, comprising:
a) transplanting modified cells of claim 16 into the subject, and
b) after (a), administering an effective amount of a rapamycin or a rapalog that binds to the FRB polypeptide or FRB variant polypeptide region of the chimeric stimulating polypeptide to stimulate a cell mediated immune response.

27. A method of administering a ligand to a subject who has undergone cell therapy using modified cells, comprising administering rapamycin or a rapalog to the subject, wherein the modified cells comprise modified cells of claim 16.

28. A method for treating a subject having a disease or condition associated with an elevated expression of a target antigen expressed by a target cell, comprising
a) transplanting an effective amount of modified cells into the subject; wherein the modified cells comprise a modified cell of claim 17, wherein the modified cell comprises a chimeric antigen receptor or a recombinant T cell receptor comprising an antigen recognition moiety that binds to the target antigen, and
b) after a), administering an effective amount of rapamycin or a rapalog that binds to the FRB polypeptide or FRB variant region of the chimeric stimulating polypeptide to reduce the number or concentration of target antigen or target cells in the subject.

29. A method for reducing the size of a tumor in a subject, comprising
a) administering a modified cell of claim 17 to the subject, wherein the cell comprises a chimeric antigen receptor or a recombinant T cell receptor comprising an antigen recognition moiety that binds to an antigen on the tumor; and
b) after a), administering an effective amount of rapamycin or a rapalog that binds to the FRB or FRB variant polypeptide region of the chimeric stimulating polypeptide to reduce the size of the tumor in the subject.

30. A method of controlling survival of transplanted modified cells in a subject, comprising
a) transplanting modified cells of claim 16 into the subject, and
b) after (a), administering to the subject a ligand that binds to the FKBP12 variant polypeptide region of the chimeric pro-apoptotic polypeptide in an amount effective to kill at least 90% of the modified cells that express the chimeric pro-apoptotic polypeptide.

31. A nucleic acid comprising a promoter operably linked to a polynucleotide coding for a chimeric pro-apoptotic polypeptide, wherein the chimeric pro-apoptotic polypeptide comprises
a) a pro-apoptotic polypeptide region;
b) a FKBP12-Rapamycin binding domain (FRB) polypeptide or FRB variant polypeptide region; and
c) a FKBP12 variant polypeptide region.

32. The nucleic acid of claim 31, wherein the FKBP12 variant comprises an amino acid substitution at amino acid residue 36.

33. The nucleic acid of claim 30, wherein the FKBP12 variant polypeptide region is a FKBP12v36 polypeptide region.

34. The nucleic acid of claim 32, wherein the FRB variant polypeptide region is selected from the group consisting of KLW (T2098L) (FRBL), KTF (W2101F), and KLF (T2098L, W2101F).

35. A chimeric pro-apoptotic polypeptide encoded by a nucleic acid of claim 32.

36. A modified cell transfected or transduced with a nucleic acid of claim 32.

37. The modified cell of claim 36, wherein the modified cell comprises a polynucleotide that encodes a chimeric antigen receptor or a recombinant TCR.

38. A method of controlling survival of transplanted modified cells in a subject, comprising:
a) transplanting modified cells of claim 36 into the subject; and
b) after (a), administering to the subject
i) a first ligand that binds to the FRB or FRB variant polypeptide region of the chimeric pro-apoptotic polypeptide; or
ii) a second ligand that binds to the FKBP12 variant polypeptide region of the chimeric pro-apoptotic polypeptide
wherein the first ligand or the second ligand are administered in an amount effective to kill at least 30% of the modified cells that express the chimeric pro-apoptotic polypeptide.

The application's sequence listing, which the Patent Office published only in electronic form, follows.

SEQUENCE LISTING (2364 sequences)

SEQ ID NO: 1 - DNA, 590 bp, Artificial Sequence
  Description of Artificial Sequence: Synthetic polynucleotide
tgaaagaccccacctgtaggtttggcaagctagcttaagtaacgccattttgcaaggcatggaaaaatacataactgagaatagaaaagttcagatcaaggtcaggaacagatggaacagctgaatatgggccaaacaggatatctgtggtaagcagttcctgccccggctcagggccaagaacagatggaacagctgaatatgggccaaacaggatatctgtggtaagcagttcctgccccggctcagggccaagaacagatggtccccagatgcggtccagccctcagcagtttctagagaaccatcagatgtttccagggtgccccaaggacctgaaatgaccctgtgccttatttgaactaaccaatcagttcgcttctcgcttctgttcgcgcgcttatgctccccgagctcaataaaagagcccacaacccctcactcggggcgccagtcctccgattgactgagtcgcccgggtacccgtgtatccaataaaccctcttgcagttgcatccgacttgtggtctcgctgttccttgggagggtctcctctgagtgattgactacccgtcagcgggggtctttca

SEQ ID NO: 2 - DNA, 321 bp, Homo sapiens
ggagtgcaggtggaaaccatctccccaggagacgggcgcaccttccccaagcgcggccagacctgcgtggtgcactacaccgggatgcttgaagatggaaagaaagttgattcctcccgggacagaaacaagccctttaagtttatgctaggcaagcaggaggtgatccgaggctgggaagaaggggttgcccagatgagtgtgggtcagagagccaaactgactatatctccagattatgcctatggtgccactgggcacccaggcatcatcccaccacatgccactctcgtcttcgatgtggagcttctaaaactggaa

SEQ ID NO: 3 - protein, 107 aa, Homo sapiens
GVQVETISPGDGRTFPKRGQTCVVHYTGMLEDGKKVDSSRDRNKPFKFMLGKQEVIRGWEEGVAQMSVGQRAKLTISPDYAYGATGHPGIIPPHATLVFDVELLKLE

SEQ ID NO: 4 - DNA, 18 bp, Artificial Sequence
  Description of Artificial Sequence: Synthetic oligonucleotide
tctggcggtggatccgga

SEQ ID NO: 5 - protein, 6 aa, Artificial Sequence
  Description of Artificial Sequence: Synthetic peptide
SGGGSG

SEQ ID NO: 6 - DNA, 6 bp, Artificial Sequence
  Description of Artificial Sequence: Synthetic oligonucleotide
gtcgac

SEQ ID NO: 7 - protein, 2 aa, Artificial Sequence
  Description of Artificial Sequence: Synthetic peptide
VD

SEQ ID NO: 8 - DNA, 846 bp, Artificial Sequence
  Description of Artificial Sequence: Synthetic polynucleotide
ggatttggtgatgtcggtgctcttgagagtttgaggggaaatgcagatttggcttacatcctgagcatggagccctgtggccactgcctcattatcaacaatgtgaacttctgccgtgagtccgggctccgcacccgcactggctccaacatcgactgtgagaagttgcggcgtcgcttctcctcgctgcatttcatggtggaggtgaagggcgacctgactgccaagaaaatggtgctggctttgctggagctggcgcagcaggaccacggtgctctggactgctgcgtggtggtcattctctctcacggctgtcaggccagccacctgcagttcccaggggctgtctacggcacagatggatgccctgtgtcggtcgagaagattgtgaacatcttcaatgggaccagctgccccagcctgggagggaagcccaagctctttttcatccaggcctgtggtggggagcagaaagaccatgggtttgaggtggcctccacttcccctgaagacgagtcccctggcagtaaccccgagccagatgccaccccgttccaggaaggtttgaggaccttcgaccagctggacgccatatctagtttgcccacacccagtgacatctttgtgtcctactctactttcccaggttttgtttcctggagggaccccaagagtggctcctggtacgttgagaccctggacgacatctttgagcagtgggctcactctgaagacctgcagtccctcctgcttagggtcgctaatgctgtttcggtgaaagggatttataaacagatgcctggttgctttaatttcctccggaaaaaacttttctttaaaacatca

SEQ ID NO: 9 - protein, 282 aa, Artificial Sequence
  Description of Artificial Sequence: Synthetic polypeptide
GFGDVGALESLRGNADLAYILSMEPCGHCLIINNVNFCRESGLRTRTGSNIDCEKLRRRFSSLHFMVEVKGDLTAKKMVLALLELAQQDHGALDCCVVVILSHGCQASHLQFPGAVYGTDGCPVSVEKIVNIFNGTSCPSLGGKPKLFFIQACGGEQKDHGFEVASTSPEDESPGSNPEPDATPFQEGLRTFDQLDAISSLPTPSDIFVSYSTFPGFVSWRDPKSGSWYVETLDDIFEQWAHSEDLQSLLLRVANAVSVKGIYKQMPGCFNFLRKKLFFKTS

SEQ ID NO: 10 - DNA, 9 bp, Artificial Sequence
  Description of Artificial Sequence: Synthetic oligonucleotide
gctagcaga

SEQ ID NO: 11 - protein, 3 aa, Artificial Sequence
  Description of Artificial Sequence: Synthetic peptide
ASR

SEQ ID NO: 12 - DNA, 57 bp, Thosea asigna virus
gccgagggcaggggaagtcttctaacatgcggggacgtggaggaaaatcccgggccc

SEQ ID NO: 13 - protein, 19 aa, Thosea asigna virus
AEGRGSLLTCGDVEENPGP

SEQ ID NO: 14 - DNA, 999 bp, Homo sapiens
atgccacctcctcgcctcctcttcttcctcctcttcctcacccccatggaagtcaggcccgaggaacctctagtggtgaaggtggaagagggagataacgctgtgctgcagtgcctcaaggggacctcagatggccccactcagcagctgacctggtctcgggagtccccgcttaaacccttcttaaaactcagcctggggctgccaggcctgggaatccacatgaggcccctggccatctggcttttcatcttcaacgtctctcaacagatggggggcttctacctgtgccagccggggcccccctctgagaaggcctggcagcctggctggacagtcaatgtggagggcagcggggagctgttccggtggaatgtttcggacctaggtggcctgggctgtggcctgaagaacaggtcctcagagggccccagctccccttccgggaagctcatgagccccaagctgtatgtgtgggccaaagaccgccctgagatctgggagggagagcctccgtgtctcccaccgagggacagcctgaaccagagcctcagccaggacctcaccatggcccctggctccacactctggctgtcctgtggggtaccccctgactctgtgtccaggggccccctctcctggacccatgtgcaccccaaggggcctaagtcattgctgagcctagagctgaaggacgatcgcccggccagagatatgtgggtaatggagacgggtctgttgttgccccgggccacagctcaagacgctggaaagtattattgtcaccgtggcaacctgaccatgtcattccacctggagatcactgctcggccagtactatggcactggctgctgaggactggtggctggaaggtctcagctgtgactttggcttatctgatcttctgcctgtgttcccttgtgggcattcttcatcttcaaagagccctggtcctgaggaggaaaagaaagcgaatgactgaccccaccaggagattc

SEQ ID NO: 15 - protein, 333 aa, Homo sapiens
MPPPRLLFFLLFLTPMEVRPEEPLVVKVEEGDNAVLQCLKGTSDGPTQQLTWSRESPLKPFLKLSLGLPGLGIHMRPLAIWLFIFNVSQQMGGFYLCQPGPPSEKAWQPGWTVNVEGSGELFRWNVSDLGGLGCGLKNRSSEGPSSPSGKLMSPKLYVWAKDRPEIWEGEPPCLPPRDSLNQSLSQDLTMAPGSTLWLSCGVPPDSVSRGPLSWTHVHPKGPKSLLSLELKDDRPARDMWVMETGLLLPRATAQDAGKYYCHRGNLTMSFHLEITARPVLWHWLLRTGGWKVSAVTLAYLIFCLCSLVGILHLQRALVLRRKRKRMTDPTRRF

SEQ ID NO: 16 - DNA, 590 bp, Artificial Sequence
  Description of Artificial Sequence: Synthetic polynucleotide
tgaaagaccccacctgtaggtttggcaagctagcttaagtaacgccattttgcaaggcatggaaaaatacataactgagaatagagaagttcagatcaaggtcaggaacagatggaacagctgaatatgggccaaacaggatatctgtggtaagcagttcctgccccggctcagggccaagaacagatggaacagctgaatatgggccaaacaggatatctgtggtaagcagttcctgccccggctcagggccaagaacagatggtccccagatgcggtccagccctcagcagtttctagagaaccatcagatgtttccagggtgccccaaggacctgaaatgaccctgtgccttatttgaactaaccaatcagttcgcttctcgcttctgttcgcgcgcttctgctccccgagctcaataaaagagcccacaacccctcactcggggcgccagtcctccgattgactgagtcgcccgggtacccgtgtatccaataaaccctcttgcagttgcatccgacttgtggtctcgctgttccttgggagggtctcctctgagtgattgactacccgtcagcgggggtctttca

SEQ ID NO: 17 - DNA, 8622 bp, Artificial Sequence
  Description of Artificial Sequence: Synthetic polynucleotide
tgaaagaccccacctgtaggtttggcaagctagcttaagtaacgccattttgcaaggcatggaaaaatacataactgagaatagaaaagttcagatcaaggtcaggaacagatggaacagctgaatatgggccaaacaggatatctgtggtaagcagttcctgccccggctcagggccaagaacagatggaacagctgaatatgggccaaacaggatatctgtggtaagcagttcctgccccggctcagggccaagaacagatggtccccagatgcggtccagccctcagcagtttctagagaaccatcagatgtttccagggtgccccaaggacctgaaatgaccctgtgccttatttgaactaaccaatcagttcgcttctcgcttctgttcgcgcgcttatgctccccgagctcaataaaagagcccacaacccctcactcggggcgccagtcctccgattgactgagtcgcccgggtacccgtgtatccaataaaccctcttgcagttgcatccgacttgtggtctcgctgttccttgggagggtctcctctgagtgattgactacccgtcagcgggggtctttcatttgggggctcgtccgggatcgggagacccctgcccagggaccaccgacccaccaccgggaggtaagctggccagcaacttatctgtgtctgtccgattgtctagtgtctatgactgattttatgcgcctgcgtcggtactagttagctaactagctctgtatctggcggacccgtggtggaactgacgagttcggaacacccggccgcaaccctgggagacgtcccagggacttcgggggccgtttttgtggcccgacctgagtcctaaaatcccgatcgtttaggactctttggtgcaccccccttagaggagggatatgtggttctggtaggagacgagaacctaaaacagttcccgcctccgtctgaatttttgctttcggtttgggaccgaagccgcgccgcgcgtcttgtctgctgcagcatcgttctgtgttgtctctgtctgactgtgtttctgtatttgtctgaaaatatgggcccgggctagcctgttaccactcccttaagtttgaccttaggtcactggaaagatgtcgagcggatcgctcacaaccagtcggtagatgtcaagaagagacgttgggttaccttctgctctgcagaatggccaacctttaacgtcggatggccgcgagacggcacctttaaccgagacctcatcacccaggttaagatcaaggtcttttcacctggcccgcatggacacccagaccaggtggggtacatcgtgacctgggaagccttggcttttgacccccctccctgggtcaagccctttgtacaccctaagcctccgcctcctcttcctccatccgccccgtctctcccccttgaacctcctcgttcgaccccgcctcgatcctccctttatccagccctcactccttctctaggcgcccccatatggccatatgagatcttatatggggcacccccgccccttgtaaacttccctgaccctgacatgacaagagttactaacagcccctctctccaagctcacttacaggctctctacttagtccagcacgaagtctggagacctctggcggcagcctaccaagaacaactggaccgaccggtggtacctcacccttaccgagtcggcgacacagtgtgggtccgccgacaccagactaagaacctagaacctcgctggaaaggaccttacacagtcctgctgaccacccccaccgccctcaaagtagacggcatcgcagcttggatacacgccgcccacgtgaaggctgccgaccccgggggtggaccatcctctagactgccatgctcgagggagtgcaggtggaaaccatctccccaggagacgggcgcaccttccccaagcgcggccagacctgcgtggtgcactacaccgggatgcttgaagatggaaagaaagttgattcctcccgggacagaaacaagccctttaagtttatgctaggcaagcaggaggtgatccgaggctgggaagaaggggttgcccagatgagtgtgggtcagagagccaaactgactatatctccagattatgcctatggtgccactgggcacccaggcatcatcccaccacatgccactctcgtcttcgatgtggagcttctaaaactggaatctggcggtggatccggagtcgacggatttggtgatgtcggtgctcttgagagtttgaggggaaatgcagatttggcttacatcctgagcatggagccctgtggccactgcctcattatcaacaatgtgaacttctgccgtgagtccgggctccgcacccgcactggctccaacatcgactgtgagaagttgcggcgtcgcttctcctcgctgcatttcatggtggaggtgaagggcgacctgactgccaagaaaatggtgctggctttgctggagctggcgcagcaggaccacggtgctctggactgctgcgtggtggtcattctctctcacggctgtcaggccagccacctgcagttcccaggggctgtctacggcacagatggatgccctgtgtcggtcgagaagattgtgaacatcttcaatgggaccagctgccccagcctgggagggaagcccaagctctttttcatccaggcctgtggtggggagcagaaagaccatgggtttgaggtggcctccacttcccctgaagacgagtcccctggcagtaaccccgagccagatgccaccccgttccaggaaggtttgaggaccttcgaccagctggacgccatatctagtttgcccacacccagtgacatctttgtgtcctactctactttcccaggttttgtttcctggagggaccccaagagtggctcctggtacgttgagaccctggacgacatctttgagcagtgggctcactctgaagacctgcagtccctcctgcttagggtcgctaatgctgtttcggtgaaagggatttataaacagatgcctggttgctttaatttcctccggaaaaaacttttctttaaaacatcagctagcagagccgagggcaggggaagtcttctaacatgcggggacgtggaggaaaatcccgggcccatgccacctcctcgcctcctcttcttcctcctcttcctcacccccatggaagtcaggcccgaggaacctctagtggtgaaggtggaagagggagataacgctgtgctgcagtgcctcaaggggacctcagatggccccactcagcagctgacctggtctcgggagtccccgcttaaacccttcttaaaactcagcctggggctgccaggcctgggaatccacatgaggcccctggccatctggcttttcatcttcaacgtctctcaacagatggggggcttctacctgtgccagccggggcccccctctgagaaggcctggcagcctggctggacagtcaatgtggagggcagcggggagctgttccggtggaatgtttcggacctaggtggcctgggctgtggcctgaagaacaggtcctcagagggccccagctccccttccgggaagctcatgagccccaagctgtatgtgtgggccaaagaccgccctgagatctgggagggagagcctccgtgtctcccaccgagggacagcctgaaccagagcctcagccaggacctcaccatggcccctggctccacactctggctgtcctgtggggtaccccctgactctgtgtccaggggccccctctcctggacccatgtgcaccccaaggggcctaagtcattgctgagcctagagctgaaggacgatcgcccggccagagatatgtgggtaatggagacgggtctgttgttgccccgggccacagctcaagacgctggaaagtattattgtcaccgtggcaacctgaccatgtcattccacctggagatcactgctcggccagtactatggcactggctgctgaggactggtggctggaaggtctcagctgtgactttggcttatctgatcttctgcctgtgttcccttgtgggcattcttcatcttcaaagagccctggtcctgaggaggaaaagaaagcgaatgactgaccccaccaggagattctaacgcgtcatcatcgatccggattagtccaatttgttaaagacaggatatcagtggtccaggctctagttttgactcaacaatatcaccagctgaagcctatagagtacgagccatagataaaataaaagattttatttagtctccagaaaaaggggggaatgaaagaccccacctgtaggtttggcaagctagcttaagtaacgccattttgcaaggcatggaaaaatacataactgagaatagagaagttcagatcaaggtcaggaacagatggaacagctgaatatgggccaaacaggatatctgtggtaagcagttcctgccccggctcagggccaagaacagatggaacagctgaatatgggccaaacaggatatctgtggtaagcagttcctgccccggctcagggccaagaacagatggtccccagatgcggtccagccctcagcagtttctagagaaccatcagatgtttccagggtgccccaaggacctgaaatgaccctgtgccttatttgaactaaccaatcagttcgcttctcgcttctgttcgcgcgcttctgctccccgagctcaataaaagagcccacaacccctcactcggggcgccagtcctccgattgactgagtcgcccgggtacccgtgtatccaataaaccctcttgcagttgcatccgacttgtggtctcgctgttccttgggagggtctcctctgagtgattgactacccgtcagcgggggtctttcacacatgcagcatgtatcaaaattaatttggttttttttcttaagtatttacattaaatggccatagtacttaaagttacattggcttccttgaaataaacatggagtattcagaatgtgtcataaatatttctaattttaagatagtatctccattggctttctactttttcttttatttttttttgtcctctgtcttccatttgttgttgttgttgtttgtttgtttgtttgttggttggttggttaatttttttttaaagatcctacactatagttcaagctagactattagctactctgtaacccagggtgaccttgaagtcatgggtagcctgctgttttagccttcccacatctaagattacaggtatgagctatcatttttggtatattgattgattgattgattgatgtgtgtgtgtgtgattgtgtttgtgtgtgtgactgtgaaaatgtgtgtatgggtgtgtgtgaatgtgtgtatgtatgtgtgtgtgtgagtgtgtgtgtgtgtgtgtgcatgtgtgtgtgtgtgactgtgtctatgtgtatgactgtgtgtgtgtgtgtgtgtgtgtgtgtgtgtgtgtgtgtgtgtgtgttgtgaaaaaatattctatggtagtgagagccaacgctccggctcaggtgtcaggttggtttttgagacagagtctttcacttagcttggaattcactggccgtcgttttacaacgtcgtgactgggaaaaccctggcgttacccaacttaatcgccttgcagcacatccccctttcgccagctggcgtaatagcgaagaggcccgcaccgatcgcccttcccaacagttgcgcagcctgaatggcgaatggcgcctgatgcggtattttctccttacgcatctgtgcggtatttcacaccgcatatggtgcactctcagtacaatctgctctgatgccgcatagttaagccagccccgacacccgccaacacccgctgacgcgccctgacgggcttgtctgctcccggcatccgcttacagacaagctgtgaccgtctccgggagctgcatgtgtcagaggttttcaccgtcatcaccgaaacgcgcgatgacgaaagggcctcgtgatacgcctatttttataggttaatgtcatgataataatggtttcttagacgtcaggtggcacttttcggggaaatgtgcgcggaacccctatttgtttatttttctaaatacattcaaatatgtatccgctcatgagacaataaccctgataaatgcttcaataatattgaaaaaggaagagtatgagtattcaacatttccgtgtcgcccttattcccttttttgcggcattttgccttcctgtttttgctcacccagaaacgctggtgaaagtaaaagatgctgaagatcagttgggtgcacgagtgggttacatcgaactggatctcaacagcggtaagatccttgagagttttcgccccgaagaacgttttccaatgatgagcacttttaaagttctgctatgtggcgcggtattatcccgtattgacgccgggcaagagcaactcggtcgccgcatacactattctcagaatgacttggttgagtactcaccagtcacagaaaagcatcttacggatggcatgacagtaagagaattatgcagtgctgccataaccatgagtgataacactgcggccaacttacttctgacaacgatcggaggaccgaaggagctaaccgcttttttgcacaacatgggggatcatgtaactcgccttgatcgttgggaaccggagctgaatgaagccataccaaacgacgagcgtgacaccacgatgcctgtagcaatggcaacaacgttgcgcaaactattaactggcgaactacttactctagcttcccggcaacaattaatagactggatggaggcggataaagttgcaggaccacttctgcgctcggcccttccggctggctggtttattgctgataaatctggagccggtgagcgtgggtctcgcggtatcattgcagcactggggccagatggtaagccctcccgtatcgtagttatctacacgacggggagtcaggcaactatggatgaacgaaatagacagatcgctgagataggtgcctcactgattaagcattggtaactgtcagaccaagtttactcatatatactttagattgatttaaaacttcatttttaatttaaaaggatctaggtgaagatcctttttgataatctcatgaccaaaatcccttaacgtgagttttcgttccactgagcgtcagaccccgtagaaaagatcaaaggatcttcttgagatcctttttttctgcgcgtaatctgctgcttgcaaacaaaaaaaccaccgctaccagcggtggtttgtttgccggatcaagagctaccaactctttttccgaaggtaactggcttcagcagagcgcagataccaaatactgtccttctagtgtagccgtagttaggccaccacttcaagaactctgtagcaccgcctacatacctcgctctgctaatcctgttaccagtggctgctgccagtggcgataagtcgtgtcttaccgggttggactcaagacgatagttaccggataaggcgcagcggtcgggctgaacggggggttcgtgcacacagcccagcttggagcgaacgacctacaccgaactgagatacctacagcgtgagcattgagaaagcgccacgcttcccgaagggagaaaggcggacaggtatccggtaagcggcagggtcggaacaggagagcgcacgagggagcttccagggggaaacgcctggtatctttatagtcctgtcgggtttcgccacctctgacttgagcgtcgatttttgtgatgctcgtcaggggggcggagcctatggaaaaacgccagcaacgcggcctttttacggttcctggccttttgctggccttttgctcacatgttctttcctgcgttatcccctgattctgtggataaccgtattaccgcctttgagtgagctgataccgctcgccgcagccgaacgaccgagcgcagcgagtcagtgagcgaggaagcggaagagcgcccaatacgcaaaccgcctctccccgcgcgttggccgattcattaatgcagctggcacgacaggtttcccgactggaaagcgggcagtgagcgcaacgcaattaatgtgagttagctcactcattaggcaccccaggctttacactttatgcttccggctcgtatgttgtgtggaattgtgagcggataacaatttcacacaggaaacagctatgaccatgattacgccaagctttgctcttaggagtttcctaatacatcccaaactcaaatatataaagcatttgacttgttctatgccctagggggcggggggaagctaagccagctttttttaacatttaaaatgttaattccattttaaatgcacagatgtttttatttcataagggtttcaatgtgcatgaatgctgcaatattcctgttaccaaagctagtataaataaaaatagataaacgtggaaattacttagagtttctgtcattaacgtttccttcctcagttgacaacataaatgcgctgctgagcaagccagtttgcatctgtcaggatcaatttcccattatgccagtcatattaattactagtcaattagttgatttttatttttgacatatacatgtgaa

SEQ ID NO: 18 - DNA, 678 bp, Artificial Sequence
  Description of Artificial Sequence: Synthetic polynucleotide
ctcgagggcgtccaagtcgaaaccattagtcccggcgatggcagaacatttcctaaaaggggacaaacatgtgtcgtccattatacaggcatgttggaggacggcaaaaaggtggacagtagtagagatcgcaataaacctttcaaattcatgttgggaaaacaagaagtcattaggggatgggaggagggcgtggctcaaatgtccgtcggccaacgcgctaagctcaccatcagccccgactacgcatacggcgctaccggacatcccggaattattccccctcacgctaccttggtgtttgacgtcgaactgttgaagctcgaagtcgagggagtgcaggtggaaaccatctccccaggagacgggcgcaccttccccaagcgcggccagacctgcgtggtgcactacaccgggatgcttgaagatggaaagaaagttgattcctcccgggacagaaacaagccctttaagtttatgctaggcaagcaggaggtgatccgaggctgggaagaaggggttgcccagatgagtgtgggtcagagagccaaactgactatatctccagattatgcctatggtgccactgggcacccaggcatcatcccaccacatgccactctcgtcttcgatgtggagcttctaaaactggaatctggcggtggatccggagtcgag

SEQ ID NO: 19 - protein, 222 aa, Artificial Sequence
  Description of Artificial Sequence: Synthetic polypeptide
GVQVETISPGDGRTFPKRGQTCVVHYTGMLEDGKKVDSSRDRNKPFKFMLGKQEVIRGWEEGVAQMSVGQRAKLTISPDYAYGATGHPGIIPPHATLVFDVELLKLEVEGVQVETISPGDGRTFPKRGQTCVVHYTGMLEDGKKVDSSRDRNKPFKFMLGKQEVIRGWEEGVAQMSVGQRAKLTISPDYAYGATGHPGIIPPHATLVFDVELLKLESGGGSG

SEQ ID NO: 20 - DNA, 1200 bp, Artificial Sequence
  Description of Artificial Sequence: Synthetic polynucleotide
atgctcgagggagtgcaggtggagactatctccccaggagacgggcgcaccttccccaagcgcggccagacctgcgtggtgcactacaccgggatgcttgaagatggaaagaaagttgattcctcccgggacagaaacaagccctttaagtttatgctaggcaagcaggaggtgatccgaggctgggaagaaggggttgcccagatgagtgtgggtcagagagccaaactgactatatctccagattatgcctatggtgccactgggcacccaggcatcatcccaccacatgccactctcgtcttcgatgtggagcttctaaaactggaatctggcggtggatccggagtcgacggatttggtgatgtcggtgctcttgagagtttgaggggaaatgcagatttggcttacatcctgagcatggagccctgtggccactgcctcattatcaacaatgtgaacttctgccgtgagtccgggctccgcacccgcactggctccaacatcgactgtgagaagttgcggcgtcgcttctcctcgctgcatttcatggtggaggtgaagggcgacctgactgccaagaaaatggtgctggctttgctggagctggcgcggcaggaccacggtgctctggactgctgcgtggtggtcattctctctcacggctgtcaggccagccacctgcagttcccaggggctgtctacggcacagatggatgccctgtgtcggtcgagaagattgtgaacatcttcaatgggaccagctgccccagcctgggagggaagcccaagctctttttcatccaggcctgtggtggggagcagaaagaccatgggtttgaggtggcctccacttcccctgaagacgagtcccctggcagtaaccccgagccagatgccaccccgttccaggaaggtttgaggaccttcgaccagctggacgccatatctagtttgcccacacccagtgacatctttgtgtcctactctactttcccaggttttgtttcctggagggaccccaagagtggctcctggtacgttgagaccctggacgacatctttgagcagtgggctcactctgaagacctgcagtccctcctgcttagggtcgctaatgctgtttcggtgaaagggatttataaacagatgcctggttgctttaatttcctccggaaaaaacttttctttaaaacatca

SEQ ID NO: 21 - protein, 107 aa, Artificial Sequence; identical to SEQ ID NO: 3
  Description of Artificial Sequence: Synthetic polypeptide

SEQ ID NO: 22 - protein, 282 aa, Artificial Sequence
  Description of Artificial Sequence: Synthetic polypeptide
GFGDVGALESLRGNADLAYILSMEPCGHCLIINNVNFCRESGLRTRTGSNIDCEKLRRRFSSLHFMVEVKGDLTAKKMVLALLELARQDHGALDCCVVVILSHGCQASHLQFPGAVYGTDGCPVSVEKIVNIFNGTSCPSLGGKPKLFFIQACGGEQKDHGFEVASTSPEDESPGSNPEPDATPFQEGLRTFDQLDAISSLPTPSDIFVSYSTFPGFVSWRDPKSGSWYVETLDDIFEQWAHSEDLQSLLLRVANAVSVKGIYKQMPGCFNFLRKKLFFKTS

SEQ ID NO: 23 - DNA, 846 bp, Artificial Sequence
  Description of Artificial Sequence: Synthetic polynucleotide
ggatttggtgatgtcggtgctcttgagagtttgaggggaaatgcagatttggcttacatcctgagcatggagccctgtggccactgcctcattatcaacaatgtgaacttctgccgtgagtccgggctccgcacccgcactggctccaacatcgactgtgagaagttgcggcgtcgcttctcctcgctgcatttcatggtggaggtgaagggcgacctgactgccaagaaaatggtgctggctttgctggagctggcgcggcaggaccacggtgctctggactgctgcgtggtggtcattctctctcacggctgtcaggccagccacctgcagttcccaggggctgtctacggcacagatggatgccctgtgtcggtcgagaagattgtgaacatcttcaatgggaccagctgccccagcctgggagggaagcccaagctctttttcatccaggcctgtggtggggagcagaaagaccatgggtttgaggtggcctccacttcccctgaagacgagtcccctggcagtaaccccgagccagatgccaccccgttccaggaaggtttgaggaccttcgaccagctggccgccatatctagtttgcccacacccagtgacatctttgtgtcctactctactttcccaggttttgtttcctggagggaccccaagagtggctcctggtacgttgagaccctggacgacatctttgagcagtgggctcactctgaagacctgcagtccctcctgcttagggtcgctaatgctgtttcggtgaaagggatttataaacagatgcctggttgctttaatttcctccggaaaaaacttttctttaaaacatca

SEQ ID NO: 24 - protein, 282 aa, Artificial Sequence
  Description of Artificial Sequence: Synthetic polypeptide
GFGDVGALESLRGNADLAYILSMEPCGHCLIINNVNFCRESGLRTRTGSNIDCEKLRRRFSSLHFMVEVKGDLTAKKMVLALLELARQDHGALDCCVVVILSHGCQASHLQFPGAVYGTDGCPVSVEKIVNIFNGTSCPSLGGKPKLFFIQACGGEQKDHGFEVASTSPEDESPGSNPEPDATPFQEGLRTFDQLAAISSLPTPSDIFVSYSTFPGFVSWRDPKSGSWYVETLDDIFEQWAHSEDLQSLLLRVANAVSVKGIYKQMPGCFNFLRKKLFFKTS

SEQ ID NO: 25 - DNA, 846 bp, Artificial Sequence
  Description of Artificial Sequence: Synthetic polynucleotide
ggatttggtgatgtcggtgctcttgagagtttgaggggaaatgcagatttggcttacatcctgagcatggagccctgtggccactgcctcattatcaacaatgtgaacttctgccgtgagtccgggctccgcacccgcactggctccaacatcgactgtgagaagttgcggcgtcgcttctcctcgctgcatttcatggtggaggtgaagggcgacctgactgccaagaaaatggtgctggctttgctggagctggcgcggcaggaccacggtgctctggactgctgcgtggtggtcattctctctcacggctgtcaggccagccacctgcagttcccaggggctgtctacggcacagatggatgccctgtgtcggtcgagaagattgtgaacatcttcaatgggaccagctgccccagcctgggagggaagcccaagctctttttcatccaggcctgtggtggggagcagaaagaccatgggtttgaggtggcctccacttcccctgaagacgagtcccctggcagtaaccccgagccagatgccaccccgttccaggaaggtttgaggaccttcgaccagctggacgccatatctagtttgcccacacccagtgacatctttgtgtcctactctactttcccaggttttgtttcctggagggaccccaagagtggctcctggtacgttgagaccctggacgacatctttgagcagtgggctcactctgaagacctgcagtccctcctgcttagggtcgctaatgctgtttcggtgaaagggatttataaacagatgcctggttgctttcagttcctccggaaaaaacttttctttaaaacatca

SEQ ID NO: 26 - protein, 282 aa, Artificial Sequence
  Description of Artificial Sequence: Synthetic polypeptide
GFGDVGALESLRGNADLAYILSMEPCGHCLIINNVNFCRESGLRTRTGSNIDCEKLRRRFSSLHFMVEVKGDLTAKKMVLALLELARQDHGALDCCVVVILSHGCQASHLQFPGAVYGTDGCPVSVEKIVNIFNGTSCPSLGGKPKLFFIQACGGEQKDHGFEVASTSPEDESPGSNPEPDATPFQEGLRTFDQLDAISSLPTPSDIFVSYSTFPGFVSWRDPKSGSWYVETLDDIFEQWAHSEDLQSLLLRVANAVSVKGIYKQMPGCFQFLRKKLFFKTS

SEQ ID NO: 27 - DNA, 846 bp, Artificial Sequence
  Description of Artificial Sequence: Synthetic polynucleotide
ggatttggtgatgtcggtgctcttgagagtttgaggggaaatgcagatttggcttacatcctgagcatggagccctgtggccactgcctcattatcaacaatgtgaacttctgccgtgagtccgggctccgcacccgcactggctccaacatcgactgtgagaagttgcggcgtcgcttctcctcgctgcatttcatggtggaggtgaagggcgacctgactgccaagaaaatggtgctggctttgctggagctggcgcggcaggaccacggtgctctggactgctgcgtggtggtcattctctctcacggctgtcaggccagccacctgcagttcccaggggctgtctacggcacagatggatgccctgtgtcggtcgagaagattgtgaacatcttcaatgggaccagctgccccagcctgggagggaagcccaagctctttttcatccaggcctgtggtggggagcagaaagaccatgggtttgaggtggcctccacttcccctgaagacgagtcccctggcagtaaccccgagccagatgccaccccgttccaggaaggtttgaggaccttcgaccagctggccgccatatctagtttgcccacacccagtgacatctttgtgtcctactctactttcccaggttttgtttcctggagggaccccaagagtggctcctggtacgttgagaccctggacgacatctttgagcagtgggctcactctgaagacctgcagtccctcctgcttagggtcgctaatgctgtttcggtgaaagggatttataaacagatgcctggttgctttcagttcctccggaaaaaacttttctttaaaacatca

SEQ ID NO: 28 - protein, 282 aa, Artificial Sequence
  Description of Artificial Sequence: Synthetic polypeptide
GFGDVGALESLRGNADLAYILSMEPCGHCLIINNVNFCRESGLRTRTGSNIDCEKLRRRFSSLHFMVEVKGDLTAKKMVLALLELARQDHGALDCCVVVILSHGCQASHLQFPGAVYGTDGCPVSVEKIVNIFNGTSCPSLGGKPKLFFIQACGGEQKDHGFEVASTSPEDESPGSNPEPDATPFQEGLRTFDQLAAISSLPTPSDIFVSYSTFPGFVSWRDPKSGSWYVETLDDIFEQWAHSEDLQSLLLRVANAVSVKGIYKQMPGCFQFLRKKLFFKTS

SEQ ID NO: 29 - DNA, 321 bp, Artificial Sequence
  Description of Artificial Sequence: Synthetic polynucleotide
ggcgttcaagtagaaacaatcagcccaggagacggaaggactttccccaaacgaggccaaacatgcgtagttcattatactgggatgctcgaagatggaaaaaaagtagatagtagtagagaccgaaacaaaccatttaaatttatgttgggaaaacaagaagtaataaggggctgggaagaaggtgtagcacaaatgtctgttggccagcgcgcaaaactcacaatttctcctgattatgcttacggagctaccggccaccccggcatcataccccctcatgccacactggtgtttgacgtcgaattgctcaaactggaa

SEQ ID NO: 30 - protein, 107 aa, Artificial Sequence; identical to SEQ ID NO: 3
  Description of Artificial Sequence: Synthetic polypeptide

SEQ ID NO: 31 - DNA, 321 bp, Artificial Sequence
  Description of Artificial Sequence: Synthetic polynucleotide
ggagtgcaggtggagacgattagtcctggggatgggagaacctttccaaagcgcggtcagacctgtgttgtccactacaccggtatgctggaggacgggaagaaggtggactcttcacgcgatcgcaataagcctttcaagttcatgctcggcaagcaggaggtgatccgggggtgggaggagggcgtggctcagatgtcggtcgggcaacgagcgaagcttaccatctcacccgactacgcgtatggggcaacggggcatccgggaattatccctccccacgctacgctcgtattcgatgtggagctcttgaagcttgag

SEQ ID NO: 32 - protein, 107 aa, Artificial Sequence; identical to SEQ ID NO: 3
  Description of Artificial Sequence: Synthetic polypeptide

SEQ ID NO: 33 - DNA, 1002 bp, Artificial Sequence
  Description of Artificial Sequence: Synthetic polynucleotide
atgccccctcctagactgctgtttttcctgctctttctcaccccaatggaagttagacctgaggaaccactggtcgttaaagtggaagaaggtgataatgctgtcctccaatgccttaaagggaccagcgacggaccaacgcagcaactgacttggagccgggagtcccctctcaagccgtttctcaagctgtcacttggcctgccaggtcttggtattcacatgcgcccccttgccatttggctcttcatattcaatgtgtctcaacaaatgggtggattctacctttgccagcccggccccccttctgagaaagcttggcagcctggatggaccgtcaatgttgaaggctccggtgagctgtttagatggaatgtgagcgaccttggcggactcggttgcggactgaaaaataggagctctgaaggaccctcttctccctccggtaagttgatgtcacctaagctgtacgtgtgggccaaggaccgccccgaaatctgggagggcgagcctccatgcctgccgcctcgcgattcactgaaccagtctctgtcccaggatctcactatggcgcccggatctactctttggctgtcttgcggcgttcccccagatagcgtgtcaagaggacctctgagctggacccacgtacaccctaagggccctaagagcttgttgagcctggaactgaaggacgacagacccgcacgcgatatgtgggtaatggagaccggccttctgctccctcgcgctaccgcacaggatgcagggaaatactactgtcatagagggaatctgactatgagctttcatctcgaaattacagcacggcccgttctttggcattggctcctccggactggaggctggaaggtgtctgccgtaacactcgcttacttgattttttgcctgtgtagcctggttgggatcctgcatcttcagcgagcccttgtattgcgccgaaaaagaaaacgaatgactgaccctacacgacgattctga

SEQ ID NO: 34 - protein, 333 aa, Artificial Sequence; identical to SEQ ID NO: 15
  Description of Artificial Sequence: Synthetic polypeptide

SEQ ID NO: 35 - DNA, 330 bp, Artificial Sequence
  Description of Artificial Sequence: Synthetic polynucleotide
atgctggagggagtgcaggtggagactattagccccggagatggcagaacattccccaaaagaggacagacttgcgtcgtgcattatactggaatgctggaagacggcaagaaggtggacagcagccgggaccgaaacaagcccttcaagttcatgctggggaagcaggaagtgatccggggctgggaggaaggagtcgcacagatgtcagtgggacagagggccaaactgactattagcccagactacgcttatggagcaaccggccaccccgggatcattccccctcatgctacactggtcttcgatgtggagctgctgaagctggaa

SEQ ID NO: 36 - protein, 110 aa, Artificial Sequence
  Description of Artificial Sequence: Synthetic polypeptide
MLEGVQVETISPGDGRTFPKRGQTCVVHYTGMLEDGKKVDSSRDRNKPFKFMLGKQEVIRGWEEGVAQMSVGQRAKLTISPDYAYGATGHPGIIPPHATLVFDVELLKLE

SEQ ID NO: 37 - DNA, 18 bp, Artificial Sequence
  Description of Artificial Sequence: Synthetic oligonucleotide
agcggaggaggatccgga

SEQ ID NO: 38 - protein, 6 aa, Artificial Sequence
  Description of Artificial Sequence: Synthetic peptide
SGGGSG

SEQ ID NO: 39 - DNA, 864 bp, Artificial Sequence
  Description of Artificial Sequence: Synthetic polynucleotide
gtggacgggtttggagatgtgggagccctggaatccctgcggggcaatgccgatctggcttacatcctgtctatggagccttgcggccactgtctgatcattaacaatgtgaacttctgcagagagagcgggctgcggaccagaacaggatccaatattgactgtgaaaagctgcggagaaggttctctagtctgcactttatggtcgaggtgaaaggcgatctgaccgctaagaaaatggtgctggccctgctggaactggctcggcaggaccatggggcactggattgctgcgtggtcgtgatcctgagtcacggctgccaggcttcacatctgcagttccctggggcagtctatggaactgacggctgtccagtcagcgtggagaagatcgtgaacatcttcaacggcacctcttgcccaagtctgggcgggaagcccaaactgttctttattcaggcctgtggaggcgagcagaaagatcacggcttcgaagtggctagcacctcccccgaggacgaatcacctggaagcaaccctgagccagatgcaacccccttccaggaaggcctgaggacatttgaccagctggatgccatctcaagcctgcccacaccttctgacattttcgtctcttacagtactttccctggatttgtgagctggcgcgatccaaagtcaggcagctggtacgtggagacactggacgatatctttgagcagtgggcccattctgaagacctgcagagtctgctgctgcgagtggccaatgctgtctctgtgaaggggatctacaaacagatgccaggatgcttccagtttctgagaaagaaactgttctttaagacctccgcatctagggcc

SEQ ID NO: 40 - protein, 288 aa, Artificial Sequence
  Description of Artificial Sequence: Synthetic polypeptide
VDGFGDVGALESLRGNADLAYILSMEPCGHCLIINNVNFCRESGLRTRTGSNIDCEKLRRRFSSLHFMVEVKGDLTAKKMVLALLELARQDHGALDCCVVVILSHGCQASHLQFPGAVYGTDGCPVSVEKIVNIFNGTSCPSLGGKPKLFFIQACGGEQKDHGFEVASTSPEDESPGSNPEPDATPFQEGLRTFDQLDAISSLPTPSDIFVSYSTFPGFVSWRDPKSGSWYVETLDDIFEQWAHSEDLQSLLLRVANAVSVKGIYKQMPGCFQFLRKKLFFKTSASRA

SEQ ID NO: 41 - DNA, 6 bp, Artificial Sequence
  Description of Artificial Sequence: Synthetic oligonucleotide
ccgcgg

SEQ ID NO: 42 - protein, 2 aa, Artificial Sequence
  Description of Artificial Sequence: Synthetic peptide
PR

SEQ ID NO: 43 - protein, 18 aa, Artificial Sequence
  Description of Artificial Sequence: Synthetic peptide
EGRGSLLTCGDVEENPGP

SEQ ID NO: 44 - DNA, 864 bp, Artificial Sequence
  Description of Artificial Sequence: Synthetic polynucleotide
gtcgacggatttggtgatgtcggtgctcttgagagtttgaggggaaatgcagatttggcttacatcctgagcatggagccctgtggccactgcctcattatcaacaatgtgaacttctgccgtgagtccgggctccgcacccgcactggctccaacatcgactgtgagaagttgcggcgtcgcttctcctcgctgcatttcatggtggaggtgaagggcgacctgactgccaagaaaatggtgctggctttgctggagctggcgcggcaggaccacggtgctctggactgctgcgtggtggtcattctctctcacggctgtcaggccagccacctgcagttcccaggggctgtctacggcacagatggatgccctgtgtcggtcgagaagattgtgaacatcttcaatgggaccagctgccccagcctgggagggaagcccaagctctttttcatccaggcctgtggtggggagcagaaagaccatgggtttgaggtggcctccacttcccctgaagacgagtcccctggcagtaaccccgagccagatgccaccccgttccaggaaggtttgaggaccttcgaccagctggacgccatatctagtttgcccacacccagtgacatctttgtgtcctactctactttcccaggttttgtttcctggagggaccccaagagtggctcctggtacgttgagaccctggacgacatctttgagcagtgggctcactctgaagacctgcagtccctcctgcttagggtcgctaatgctgtttcggtgaaagggatttataaacagatgcctggttgctttaatttcctccggaaaaaacttttctttaaaacatcagctagcagagcc

SEQ ID NO: 45 - protein, 288 aa, Artificial Sequence
  Description of Artificial Sequence: Synthetic polypeptide
VDGFGDVGALESLRGNADLAYILSMEPCGHCLIINNVNFCRESGLRTRTGSNIDCEKLRRRFSSLHFMVEVKGDLTAKKMVLALLELARQDHGALDCCVVVILSHGCQASHLQFPGAVYGTDGCPVSVEKIVNIFNGTSCPSLGGKPKLFFIQACGGEQKDHGFEVASTSPEDESPGSNPEPDATPFQEGLRTFDQLDAISSLPTPSDIFVSYSTFPGFVSWRDPKSGSWYVETLDDIFEQWAHSEDLQSLLLRVANAVSVKGIYKQMPGCFNFLRKKLFFKTSASRA

SEQ ID NO: 46 - DNA, 864 bp, Artificial Sequence
  Description of Artificial Sequence: Synthetic polynucleotide
gtggacgggtttggagatgtgggagccctggaatccctgcggggcaatgccgatctggcttacatcctgtctatggagccttgcggccactgtctgatcattaacaatgtgaacttctgcagagagagcgggctgcggaccagaacaggatccaatattgactgtgaaaagctgcggagaaggttctctagtctgcactttatggtcgaggtgaaaggcgatctgaccgctaagaaaatggtgctggccctgctggaactggctcggcaggaccatggggcactggattgctgcgtggtcgtgatcctgagtcacggctgccaggcttcacatctgcagttccctggggcagtctatggaactgacggctgtccagtcagcgtggagaagatcgtgaacatcttcaacggcacctcttgcccaagtctgggcgggaagcccaaactgttctttattcaggcctgtggaggcgagcagaaagatcacggcttcgaagtggctagcacctcccccgaggacgaatcacctggaagcaaccctgagccagatgcaacccccttccaggaaggcctgaggacatttgaccagctggatgccatctcaagcctgcccacaccttctgacattttcgtctcttacagtactttccctggatttgtgagctggcgcgatccaaagtcaggcagctggtacgtggagacactggacgatatctttgagcagtgggcccattctgaagacctgcagagtctgctgctgcgagtggccaatgctgtctctgtgaaggggatctacaaacagatgccaggatgcttcaactttctgagaaagaaactgttctttaagacctccgcatctagggcc

SEQ ID NO: 47 - protein, 288 aa, Artificial Sequence; identical to SEQ ID NO: 45
  Description of Artificial Sequence: Synthetic polypeptide

SEQ ID NO: 48 - DNA, 864 bp, Artificial Sequence
  Description of Artificial Sequence: Synthetic polynucleotide
gtcgacggatttggtgatgtcggtgctcttgaggctttgaggggaaatgcagatttggcttacatcctgagcatggagccctgtggccactgcctcattatcaacaatgtgaacttctgccgtgagtccgggctccgcacccgcactggctccaacatcgactgtgagaagttgcggcgtcgcttctcctcgctgcatttcatggtggaggtgaagggcgacctgactgccaagaaaatggtgctggctttgctggagctggcgcggcaggaccacggtgctctggactgctgcgtggtggtcattctctctcacggctgtcaggccagccacctgcagttcccaggggctgtctacggcacagatggatgccctgtgtcggtcgagaagattgtgaacatcttcaatgggaccagctgccccagcctgggagggaagcccaagctctttttcatccaggcctgtggtggggagcagaaagaccatgggtttgaggtggcctccacttcccctgaagacgagtcccctggcagtaaccccgagccagatgccaccccgttccaggaaggtttgaggaccttcgaccagctggacgccatatctagtttgcccacacccagtgacatctttgtgtcctactctactttcccaggttttgtttcctggagggaccccaagagtggctcctggtacgttgagaccctggacgacatctttgagcagtgggctcactctgaagacctgcagtccctcctgcttagggtcgctaatgctgtttcggtgaaagggatttataaacagatgcctggttgctttaatttcctccggaaaaaacttttctttaaaacatcagctagcagagcc

SEQ ID NO: 49 - protein, 288 aa, Artificial Sequence
  Description of Artificial Sequence: Synthetic polypeptide
VDGFGDVGALEALRGNADLAYILSMEPCGHCLIINNVNFCRESGLRTRTGSNIDCEKLRRRFSSLHFMVEVKGDLTAKKMVLALLELARQDHGALDCCVVVILSHGCQASHLQFPGAVYGTDGCPVSVEKIVNIFNGTSCPSLGGKPKLFFIQACGGEQKDHGFEVASTSPEDESPGSNPEPDATPFQEGLRTFDQLDAISSLPTPSDIFVSYSTFPGFVSWRDPKSGSWYVETLDDIFEQWAHSEDLQSLLLRVANAVSVKGIYKQMPGCFNFLRKKLFFKTSASRA

SEQ ID NO: 50 - DNA, 864 bp, Artificial Sequence
  Description of Artificial Sequence: Synthetic polynucleotide
gtcgacggatttggtgatgtcggtgctcttgaggacttgaggggaaatgcagatttggcttacatcctgagcatggagccctgtggccactgcctcattatcaacaatgtgaacttctgccgtgagtccgggctccgcacccgcactggctccaacatcgactgtgagaagttgcggcgtcgcttctcctcgctgcatttcatggtggaggtgaagggcgacctgactgccaagaaaatggtgctggctttgctggagctggcgcggcaggaccacggtgctctggactgctgcgtggtggtcattctctctcacggctgtcaggccagccacctgcagttcccaggggctgtctacggcacagatggatgccctgtgtcggtcgagaagattgtgaacatcttcaatgggaccagctgccccagcctgggagggaagcccaagctctttttcatccaggcctgtggtggggagcagaaagaccatgggtttgaggtggcctccacttcccctgaagacgagtcccctggcagtaaccccgagccagatgccaccccgttccaggaaggtttgaggaccttcgaccagctggacgccatatctagtttgcccacacccagtgacatctttgtgtcctactctactttcccaggttttgtttcctggagggaccccaagagtggctcctggtacgttgagaccctggacgacatctttgagcagtgggctcactctgaagacctgcagtccctcctgcttagggtcgctaatgctgtttcggtgaaagggatttataaacagatgcctggttgctttaatttcctccggaaaaaacttttctttaaaacatcagctagcagagcc

SEQ ID NO: 51 - protein, 288 aa, Artificial Sequence
  Description of Artificial Sequence: Synthetic polypeptide
VDGFGDVGALEDLRGNADLAYILSMEPCGHCLIINNVNFCRESGLRTRTGSNIDCEKLRRRFSSLHFMVEVKGDLTAKKMVLALLELARQDHGALDCCVVVILSHGCQASHLQFPGAVYGTDGCPVSVEKIVNIFNGTSCPSLGGKPKLFFIQACGGEQKDHGFEVASTSPEDESPGSNPEPDATPFQEGLRTFDQLDAISSLPTPSDIFVSYSTFPGFVSWRDPKSGSWYVETLDDIFEQWAHSEDLQSLLLRVANAVSVKGIYKQMPGCFNFLRKKLFFKTSASRA

SEQ ID NO: 52 - DNA, 864 bp, Artificial Sequence
  Description of Artificial Sequence: Synthetic polynucleotide
gtcgacggatttggtgatgtcggtgctcttgagagtttgaggggaaatgcagatttggcttacatcctgagcatggagccctgtggccactgcctcattatcaacaatgtgaacttctgccgtgagtccgggctccgcacccgcactggcgccaacatcgactgtgagaagttgcggcgtcgcttctcctcgctgcatttcatggtggaggtgaagggcgacctgactgccaagaaaatggtgctggctttgctggagctggcgcggcaggaccacggtgctctggactgctgcgtggtggtcattctctctcacggctgtcaggccagccacctgcagttcccaggggctgtctacggcacagatggatgccctgtgtcggtcgagaagattgtgaacatcttcaatgggaccagctgccccagcctgggagggaagcccaagctctttttcatccaggcctgtggtggggagcagaaagaccatgggtttgaggtggcctccacttcccctgaagacgagtcccctggcagtaaccccgagccagatgccaccccgttccaggaaggtttgaggaccttcgaccagctggacgccatatctagtttgcccacacccagtgacatctttgtgtcctactctactttcccaggttttgtttcctggagggaccccaagagtggctcctggtacgttgagaccctggacgacatctttgagcagtgggctcactctgaagacctgcagtccctcctgcttagggtcgctaatgctgtttcggtgaaagggatttataaacagatgcctggttgctttaatttcctccggaaaaaacttttctttaaaacatcagctagcagagcc

SEQ ID NO: 53 - protein, 288 aa, Artificial Sequence
  Description of Artificial Sequence: Synthetic polypeptide
VDGFGDVGALESLRGNADLAYILSMEPCGHCLIINNVNFCRESGLRTRTGANIDCEKLRRRFSSLHFMVEVKGDLTAKKMVLALLELARQDHGALDCCVVVILSHGCQASHLQFPGAVYGTDGCPVSVEKIVNIFNGTSCPSLGGKPKLFFIQACGGEQKDHGFEVASTSPEDESPGSNPEPDATPFQEGLRTFDQLDAISSLPTPSDIFVSYSTFPGFVSWRDPKSGSWYVETLDDIFEQWAHSEDLQSLLLRVANAVSVKGIYKQMPGCFNFLRKKLFFKTSASRA

SEQ ID NO: 54 - DNA, 864 bp, Artificial Sequence
  Description of Artificial Sequence: Synthetic polynucleotide
gtcgacggatttggtgatgtcggtgctcttgagagtttgaggggaaatgcagatttggcttacatcctgagcatggagccctgtggccactgcctcattatcaacaatgtgaacttctgccgtgagtccgggctccgcacccgcactggctccaacatcgactgtgagaagttgcggcgtcgcttctccgcgctgcatttcatggtggaggtgaagggcgacctgactgccaagaaaatggtgctggctttgctggagctggcgcggcaggaccacggtgctctggactgctgcgtggtggtcattctctctcacggctgtcaggccagccacctgcagttcccaggggctgtctacggcacagatggatgccctgtgtcggtcgagaagattgtgaacatcttcaatgggaccagctgccccagcctgggagggaagcccaagctctttttcatccaggcctgtggtggggagcagaaagaccatgggtttgaggtggcctccacttcccctgaagacgagtcccctggcagtaaccccgagccagatgccaccccgttccaggaaggtttgaggaccttcgaccagctggacgccatatctagtttgcccacacccagtgacatctttgtgtcctactctactttcccaggttttgtttcctggagggaccccaagagtggctcctggtacgttgagaccctggacgacatctttgagcagtgggctcactctgaagacctgcagtccctcctgcttagggtcgctaatgctgtttcggtgaaagggatttataaacagatgcctggttgctttaatttcctccggaaaaaacttttctttaaaacatcagctagcagagcc

SEQ ID NO: 55 - protein, 288 aa, Artificial Sequence
  Description of Artificial Sequence: Synthetic polypeptide
VDGFGDVGALESLRGNADLAYILSMEPCGHCLIINNVNFCRESGLRTRTGSNIDCEKLRRRFSALHFMVEVKGDLTAKKMVLALLELARQDHGALDCCVVVILSHGCQASHLQFPGAVYGTDGCPVSVEKIVNIFNGTSCPSLGGKPKLFFIQACGGEQKDHGFEVASTSPEDESPGSNPEPDATPFQEGLRTFDQLDAISSLPTPSDIFVSYSTFPGFVSWRDPKSGSWYVETLDDIFEQWAHSEDLQSLLLRVANAVSVKGIYKQMPGCFNFLRKKLFFKTSASRA

SEQ ID NO: 56 - DNA, 864 bp, Artificial Sequence
  Description of Artificial Sequence: Synthetic polynucleotide
gtcgacggatttggtgatgtcggtgctcttgagagtttgaggggaaatgcagatttggcttacatcctgagcatggagccctgtggccactgcctcattatcaacaatgtgaacttctgccgtgagtccgggctccgcacccgcactggctccaacatcgactgtgagaagttgcggcgtcgcttctccgacctgcatttcatggtggaggtgaagggcgacctgactgccaagaaaatggtgctggctttgctggagctggcgcggcaggaccacggtgctctggactgctgcgtggtggtcattctctctcacggctgtcaggccagccacctgcagttcccaggggctgtctacggcacagatggatgccctgtgtcggtcgagaagattgtgaacatcttcaatgggaccagctgccccagcctgggagggaagcccaagctctttttcatccaggcctgtggtggggagcagaaagaccatgggtttgaggtggcctccacttcccctgaagacgagtcccctggcagtaaccccgagccagatgccaccccgttccaggaaggtttgaggaccttcgaccagctggacgccatatctagtttgcccacacccagtgacatctttgtgtcctactctactttcccaggttttgtttcctggagggaccccaagagtggctcctggtacgttgagaccctggacgacatctttgagcagtgggctcactctgaagacctgcagtccctcctgcttagggtcgctaatgctgtttcggtgaaagggatttataaacagatgcctggttgctttaatttcctccggaaaaaacttttctttaaaacatcagctagcagagcc

SEQ ID NO: 57 - protein, 288 aa, Artificial Sequence
  Description of Artificial Sequence: Synthetic polypeptide
VDGFGDVGALESLRGNADLAYILSMEPCGHCLIINNVNFCRESGLRTRTGSNIDCEKLRRRFSDLHFMVEVKGDLTAKKMVLALLELARQDHGALDCCVVVILSHGCQASHLQFPGAVYGTDGCPVSVEKIVNIFNGTSCPSLGGKPKLFFIQACGGEQKDHGFEVASTSPEDESPGSNPEPDATPFQEGLRTFDQLDAISSLPTPSDIFVSYSTFPGFVSWRDPKSGSWYVETLDDIFEQWAHSEDLQSLLLRVANAVSVKGIYKQMPGCFNFLRKKLFFKTSASRA

SEQ ID NO: 58 - DNA, 864 bp, Artificial Sequence
  Description of Artificial Sequence: Synthetic polynucleotide
gtcgacggatttggtgatgtcggtgctcttgagagtttgaggggaaatgcagatttggcttacatcctgagcatggagccctgtggccactgcctcattatcaacaatgtgaacttctgccgtgagtccgggctccgcacccgcactggctccaacatcgactgtgagaagttgcggcgtcgcttctcctcgctgcatttcatggtggaggtgaagggcgacctgactgccaagaaaatggtgctggctttgctggagctggcgcggcaggaccacggtgctctggactgctgcgtggtggtcattctctctcacggctgtcaggccagccacctgcagttcccaggggctgtctacggcacagatggatgccctgtgtcggtcgagaagattgtgaacatcttcaatgggaccagctgccccagcctgggagggaagcccaagctctttttcatccaggccgcgggtggggagcagaaagaccatgggtttgaggtggcctccacttcccctgaagacgagtcccctggcagtaaccccgagccagatgccaccccgttccaggaaggtttgaggaccttcgaccagctggacgccatatctagtttgcccacacccagtgacatctttgtgtcctactctactttcccaggttttgtttcctggagggaccccaagagtggctcctggtacgttgagaccctggacgacatctttgagcagtgggctcactctgaagacctgcagtccctcctgcttagggtcgctaatgctgtttcggtgaaagggatttataaacagatgcctggttgctttaatttcctccggaaaaaacttttctttaaaacatcagctagcagagcc

SEQ ID NO: 59 - protein, 288 aa, Artificial Sequence
  Description of Artificial Sequence: Synthetic polypeptide
VDGFGDVGALESLRGNADLAYILSMEPCGHCLIINNVNFCRESGLRTRTGSNIDCEKLRRRFSSLHFMVEVKGDLTAKKMVLALLELARQDHGALDCCVVVILSHGCQASHLQFPGAVYGTDGCPVSVEKIVNIFNGTSCPSLGGKPKLFFIQAAGGEQKDHGFEVASTSPEDESPGSNPEPDATPFQEGLRTFDQLDAISSLPTPSDIFVSYSTFPGFVSWRDPKSGSWYVETLDDIFEQWAHSEDLQSLLLRVANAVSVKGIYKQMPGCFNFLRKKLFFKTSASRA

SEQ ID NO: 60 - DNA, 864 bp, Artificial Sequence
  Description of Artificial Sequence: Synthetic polynucleotide
gtcgacggatttggtgatgtcggtgctcttgagagtttgaggggaaatgcagatttggcttacatcctgagcatggagccctgtggccactgcctcattatcaacaatgtgaacttctgccgtgagtccgggctccgcacccgcactggctccaacatcgactgtgagaagttgcggcgtcgcttctcctcgctgcatttcatggtggaggtgaagggcgacctgactgccaagaaaatggtgctggctttgctggagctggcgcggcaggaccacggtgctctggactgctgcgtggtggtcattctctctcacggctgtcaggccagccacctgcagttcccaggggctgtctacggcacagatggatgccctgtgtcggtcgagaagattgtgaacatcttcaatgggaccagctgccccagcctgggagggaagcccaagctctttttcatccaggcctgtggtggggagcagaaagaccatgggtttgaggtggcctccacttcccctgaagacgagtcccctggcagtaaccccgagccagatggcaccccgttccaggaaggtttgaggaccttcgaccagctggacgccatatctagtttgcccacacccagtgacatctttgtgtcctactctactttcccaggttttgtttcctggagggaccccaagagtggctcctggtacgttgagaccctggacgacatctttgagcagtgggctcactctgaagacctgcagtccctcctgcttagggtcgctaatgctgtttcggtgaaagggatttataaacagatgcctggttgctttaatttcctccggaaaaaacttttctttaaaacatcagctagcagagcc

SEQ ID NO: 61 - protein, 288 aa, Artificial Sequence
  Description of Artificial Sequence: Synthetic polypeptide
VDGFGDVGALESLRGNADLAYILSMEPCGHCLIINNVNFCRESGLRTRTGSNIDCEKLRRRFSSLHFMVEVKGDLTAKKMVLALLELARQDHGALDCCVVVILSHGCQASHLQFPGAVYGTDGCPVSVEKIVNIFNGTSCPSLGGKPKLFFIQACGGEQKDHGFEVASTSPEDESPGSNPEPDGTPFQEGLRTFDQLDAISSLPTPSDIFVSYSTFPGFVSWRDPKSGSWYVETLDDIFEQWAHSEDLQSLLLRVANAVSVKGIYKQMPGCFNFLRKKLFFKTSASRA

SEQ ID NO: 62 - DNA, 864 bp, Artificial Sequence
  Description of Artificial Sequence: Synthetic polynucleotide
gtcgacggatttggtgatgtcggtgctcttgagagtttgaggggaaatgcagatttggcttacatcctgagcatggagccctgtggccactgcctcattatcaacaatgtgaacttctgccgtgagtccgggctccgcacccgcactggctccaacatcgactgtgagaagttgcggcgtcgcttctcctcgctgcatttcatggtggaggtgaagggcgacctgactgccaagaaaatggtgctggctttgctggagctggcgcggcaggaccacggtgctctggactgctgcgtggtggtcattctctctcacggctgtcaggccagccacctgcagttcccaggggctgtctacggcacagatggatgccctgtgtcggtcgagaagattgtgaacatcttcaatgggaccagctgccccagcctgggagggaagcccaagctctttttcatccaggcctgtggtggggagcagaaagaccatgggtttgaggtggcctccacttcccctgaagacgagtcccctggcagtaaccccgagccagatgccgccccgttccaggaaggtttgaggaccttcgaccagctggacgccatatctagtttgcccacacccagtgacatctttgtgtcctactctactttcccaggttttgtttcctggagggaccccaagagtggctcctggtacgttgagaccctggacgacatctttgagcagtgggctcactctgaagacctgcagtccctcctgcttagggtcgctaatgctgtttcggtgaaagggatttataaacagatgcctggttgctttaatttcctccggaaaaaacttttctttaaaacatcagctagcagagcc

SEQ ID NO: 63 - protein, 288 aa, Artificial Sequence
  Description of Artificial Sequence: Synthetic polypeptide
VDGFGDVGALESLRGNADLAYILSMEPCGHCLIINNVNFCRESGLRTRTGSNIDCEKLRRRFSSLHFMVEVKGDLTAKKMVLALLELARQDHGALDCCVVVILSHGCQASHLQFPGAVYGTDGCPVSVEKIVNIFNGTSCPSLGGKPKLFFIQACGGEQKDHGFEVASTSPEDESPGSNPEPDAAPFQEGLRTFDQLDAISSLPTPSDIFVSYSTFPGFVSWRDPKSGSWYVETLDDIFEQWAHSEDLQSLLLRVANAVSVKGIYKQMPGCFNFLRKKLFFKTSASRA

SEQ ID NO: 64 - DNA, 864 bp, Artificial Sequence
  Description of Artificial Sequence: Synthetic polynucleotide
gtcgacggatttggtgatgtcggtgctcttgagagtttgaggggaaatgcagatttggcttacatcctgagcatggagccctgtggccactgcctcattatcaacaatgtgaacttctgccgtgagtccgggctccgcacccgcactggctccaacatcgactgtgagaagttgcggcgtcgcttctcctcgctgcatttcatggtggaggtgaagggcgacctgactgccaagaaaatggtgctggctttgctggagctggcgcggcaggaccacggtgctctggactgctgcgtggtggtcattctctctcacggctgtcaggccagccacctgcagttcccaggggctgtctacggcacagatggatgccctgtgtcggtcgagaagattgtgaacatcttcaatgggaccagctgccccagcctgggagggaagcccaagctctttttcatccaggcctgtggtggggagcagaaagaccatgggtttgaggtggcctccacttcccctgaagacgagtcccctggcagtaaccccgagccagatgcctgcccgttccaggaaggtttgaggaccttcgaccagctggacgccatatctagtttgcccacacccagtgacatctttgtgtcctactctactttcccaggttttgtttcctggagggaccccaagagtggctcctggtacgttgagaccctggacgacatctttgagcagtgggctcactctgaagacctgcagtccctcctgcttagggtcgctaatgctgtttcggtgaaagggatttataaacagatgcctggttgctttaatttcctccggaaaaaacttttctttaaaacatcagctagcagagcc

SEQ ID NO: 65 - protein, 288 aa, Artificial Sequence
  Description of Artificial Sequence: Synthetic polypeptide
VDGFGDVGALESLRGNADLAYILSMEPCGHCLIINNVNFCRESGLRTRTGSNIDCEKLRRRFSSLHFMVEVKGDLTAKKMVLALLELARQDHGALDCCVVVILSHGCQASHLQFPGAVYGTDGCPVSVEKIVNIFNGTSCPSLGGKPKLFFIQACGGEQKDHGFEVASTSPEDESPGSNPEPDACPFQEGLRTFDQLDAISSLPTPSDIFVSYSTFPGFVSWRDPKSGSWYVETLDDIFEQWAHSEDLQSLLLRVANAVSVKGIYKQMPGCFNFLRKKLFFKTSASRA

SEQ ID NO: 66 - DNA, 864 bp, Artificial Sequence
  Description of Artificial Sequence: Synthetic polynucleotide
gtcgacggatttggtgatgtcggtgctcttgagagtttgaggggaaatgcagatttggcttacatcctgagcatggagccctgtggccactgcctcattatcaacaatgtgaacttctgccgtgagtccgggctccgcacccgcactggctccaacatcgactgtgagaagttgcggcgtcgcttctcctcgctgcatttcatggtggaggtgaagggcgacctgactgccaagaaaatggtgctggctttgctggagctggcgcggcaggaccacggtgctctggactgctgcgtggtggtcattctctctcacggctgtcaggccagccacctgcagttcccaggggctgtctacggcacagatggatgccctgtgtcggtcgagaagattgtgaacatcttcaatgggaccagctgccccagcctgggagggaagcccaagctctttttcatccaggcctgtggtggggagcagaaagaccatgggtttgaggtggcctccacttcccctgaagacgagtcccctggcagtaaccccgagccagatgcctccccgttccaggaaggtttgaggaccttcgaccagctggacgccatatctagtttgcccacacccagtgacatctttgtgtcctactctactttcccaggttttgtttcctggagggaccccaagagtggctcctggtacgttgagaccctggacgacatctttgagcagtgggctcactctgaagacctgcagtccctcctgcttagggtcgctaatgctgtttcggtgaaagggatttataaacagatgcctggttgctttaatttcctccggaaaaaacttttctttaaaacatcagctagcagagcc

SEQ ID NO: 67 - protein, 288 aa, Artificial Sequence
  Description of Artificial Sequence: Synthetic polypeptide
VDGFGDVGALESLRGNADLAYILSMEPCGHCLIINNVNFCRESGLRTRTGSNIDCEKLRRRFSSLHFMVEVKGDLTAKKMVLALLELARQDHGALDCCVVVILSHGCQASHLQFPGAVYGTDGCPVSVEKIVNIFNGTSCPSLGGKPKLFFIQACGGEQKDHGFEVASTSPEDESPGSNPEPDASPFQEGLRTFDQLDAISSLPTPSDIFVSYSTFPGFVSWRDPKSGSWYVETLDDIFEQWAHSEDLQSLLLRVANAVSVKGIYKQMPGCFNFLRKKLFFKTSASRA

SEQ ID NO: 68 - DNA, 864 bp, Artificial Sequence
  Description of Artificial Sequence: Synthetic polynucleotide
gtcgacggatttggtgatgtcggtgctcttgagagtttgaggggaaatgcagatttggcttacatcctgagcatggagccctgtggccactgcctcattatcaacaatgtgaacttctgccgtgagtccgggctccgcacccgcactggctccaacatcgactgtgagaagttgcggcgtcgcttctcctcgctgcatttcatggtggaggtgaagggcgacctgactgccaagaaaatggtgctggctttgctggagctggcgcggcaggaccacggtgctctggactgctgcgtggtggtcattctctctcacggctgtcaggccagccacctgcagttcccaggggctgtctacggcacagatggatgccctgtgtcggtcgagaagattgtgaacatcttcaatgggaccagctgccccagcctgggagggaagcccaagctctttttcatccaggcctgtggtggggagcagaaagaccatgggtttgaggtggcctccacttcccctgaagacgagtcccctggcagtaaccccgagccagatgccaccccgttccaggaaggtttgaggaccaaggaccagctggacgccatatctagtttgcccacacccagtgacatctttgtgtcctactctactttcccaggttttgtttcctggagggaccccaagagtggctcctggtacgttgagaccctggacgacatctttgagcagtgggctcactctgaagacctgcagtccctcctgcttagggtcgctaatgctgtttcggtgaaagggatttataaacagatgcctggttgctttaatttcctccggaaaaaacttttctttaaaacatcagctagcagagcc

SEQ ID NO: 69 - protein, 288 aa, Artificial Sequence
  Description of Artificial Sequence: Synthetic polypeptide
VDGFGDVGALESLRGNADLAYILSMEPCGHCLIINNVNFCRESGLRTRTGSNIDCEKLRRRFSSLHFMVEVKGDLTAKKMVLALLELARQDHGALDCCVVVILSHGCQASHLQFPGAVYGTDGCPVSVEKIVNIFNGTSCPSLGGKPKLFFIQACGGEQKDHGFEVASTSPEDESPGSNPEPDATPFQEGLRTKDQLDAISSLPTPSDIFVSYSTFPGFVSWRDPKSGSWYVETLDDIFEQWAHSEDLQSLLLRVANAVSVKGIYKQMPGCFNFLRKKLFFKTSASRA

SEQ ID NO: 70 - DNA, 864 bp, Artificial Sequence
  Description of Artificial Sequence: Synthetic polynucleotide
gtcgacggatttggtgatgtcggtgctcttgagagtttgaggggaaatgcagatttggcttacatcctgagcatggagccctgtggccactgcctcattatcaacaatgtgaacttctgccgtgagtccgggctccgcacccgcactggctccaacatcgactgtgagaagttgcggcgtcgcttctcctcgctgcatttcatggtggaggtgaagggcgacctgactgccaagaaaatggtgctggctttgctggagctggcgcggcaggaccacggtgctctggactgctgcgtggtggtcattctctctcacggctgtcaggccagccacctgcagttcccaggggctgtctacggcacagatggatgccctgtgtcggtcgagaagattgtgaacatcttcaatgggaccagctgccccagcctgggagggaagcccaagctctttttcatccaggcctgtggtggggagcagaaagaccatgggtttgaggtggcctccacttcccctgaagacgagtcccctggcagtaaccccgagccagatgccaccccgttccaggaaggtttgaggaccttcaagcagctggacgccatatctagtttgcccacacccagtgacatctttgtgtcctactctactttcccaggttttgtttcctggagggaccccaagagtggctcctggtacgttgagaccctggacgacatctttgagcagtgggctcactctgaagacctgcagtccctcctgcttagggtcgctaatgctgtttcggtgaaagggatttataaacagatgcctggttgctttaatttcctccggaaaaaacttttctttaaaacatcagctagcagagcc

SEQ ID NO: 71 - protein, 288 aa, Artificial Sequence
  Description of Artificial Sequence: Synthetic polypeptide
VDGFGDVGALESLRGNADLAYILSMEPCGHCLIINNVNFCRESGLRTRTGSNIDCEKLRRRFSSLHFMVEVKGDLTAKKMVLALLELARQDHGALDCCVVVILSHGCQASHLQFPGAVYGTDGCPVSVEKIVNIFNGTSCPSLGGKPKLFFIQACGGEQKDHGFEVASTSPEDESPGSNPEPDATPFQEGLRTFKQLDAISSLPTPSDIFVSYSTFPGFVSWRDPKSGSWYVETLDDIFEQWAHSEDLQSLLLRVANAVSVKGIYKQMPGCFNFLRKKLFFKTSASRA

SEQ ID NO: 72 - DNA, 864 bp, Artificial Sequence
  Description of Artificial Sequence: Synthetic polynucleotide
gtcgacggatttggtgatgtcggtgctcttgagagtttgaggggaaatgcagatttggcttacatcctgagcatggagccctgtggccactgcctcattatcaacaatgtgaacttctgccgtgagtccgggctccgcacccgcactggctccaacatcgactgtgagaagttgcggcgtcgcttctcctcgctgcatttcatggtggaggtgaagggcgacctgactgccaagaaaatggtgctggctttgctggagctggcgcggcaggaccacggtgctctggactgctgcgtggtggtcattctctctcacggctgtcaggccagccacctgcagttcccaggggctgtctacggcacagatggatgccctgtgtcggtcgagaagattgtgaacatcttcaatgggaccagctgccccagcctgggagggaagcccaagctctttttcatccaggcctgtggtggggagcagaaagaccatgggtttgaggtggcctccacttcccctgaagacgagtcccctggcagtaaccccgagccagatgccaccccgttccaggaaggtttgaggaccttcaggcagctggacgccatatctagtttgcccacacccagtgacatctttgtgtcctactctactttcccaggttttgtttcctggagggaccccaagagtggctcctggtacgttgagaccctggacgacatctttgagcagtgggctcactctgaagacctgcagtccctcctgcttagggtcgctaatgctgtttcggtgaaagggatttataaacagatgcctggttgctttaatttcctccggaaaaaacttttctttaaaacatcagctagcagagcc

SEQ ID NO: 73 - protein, 288 aa, Artificial Sequence
  Description of Artificial Sequence: Synthetic polypeptide
VDGFGDVGALESLRGNADLAYILSMEPCGHCLIINNVNFCRESGLRTRTGSNIDCEKLRRRFSSLHFMVEVKGDLTAKKMVLALLELARQDHGALDCCVVVILSHGCQASHLQFPGAVYGTDGCPVSVEKIVNIFNGTSCPSLGGKPKLFFIQACGGEQKDHGFEVASTSPEDESPGSNPEPDATPFQEGLRTFRQLDAISSLPTPSDIFVSYSTFPGFVSWRDPKSGSWYVETLDDIFEQWAHSEDLQSLLLRVANAVSVKGIYKQMPGCFNFLRKKLFFKTSASRA

SEQ ID NO: 74 - DNA, 864 bp, Artificial Sequence
  Description of Artificial Sequence: Synthetic polynucleotide
gtcgacggatttggtgatgtcggtgctcttgagagtttgaggggaaatgcagatttggcttacatcctgagcatggagccctgtggccactgcctcattatcaacaatgtgaacttctgccgtgagtccgggctccgcacccgcactggctccaacatcgactgtgagaagttgcggcgtcgcttctcctcgctgcatttcatggtggaggtgaagggcgacctgactgccaagaaaatggtgctggctttgctggagctggcgcggcaggaccacggtgctctggactgctgcgtggtggtcattctctctcacggctgtcaggccagccacctgcagttcccaggggctgtctacggcacagatggatgccctgtgtcggtcgagaagattgtgaacatcttcaatgggaccagctgccccagcctgggagggaagcccaagctctttttcatccaggcctgtggtggggagcagaaagaccatgggtttgaggtggcctccacttcccctgaagacgagtcccctggcagtaaccccgagccagatgccaccccgttccaggaaggtttgaggaccttcggccagctggacgccatatctagtttgcccacacccagtgacatctttgtgtcctactctactttcccaggttttgtttcctggagggaccccaagagtggctcctggtacgttgagaccctggacgacatctttgagcagtgggctcactctgaagacctgcagtccctcctgcttagggtcgctaatgctgtttcggtgaaagggatttataaacagatgcctggttgctttaatttcctccggaaaaaacttttctttaaaacatcagctagcagagcc

SEQ ID NO: 75 - protein, 288 aa, Artificial Sequence
  Description of Artificial Sequence: Synthetic polypeptide
VDGFGDVGALESLRGNADLAYILSMEPCGHCLIINNVNFCRESGLRTRTGSNIDCEKLRRRFSSLHFMVEVKGDLTAKKMVLALLELARQDHGALDCCVVVILSHGCQASHLQFPGAVYGTDGCPVSVEKIVNIFNGTSCPSLGGKPKLFFIQACGGEQKDHGFEVASTSPEDESPGSNPEPDATPFQEGLRTFGQLDAISSLPTPSDIFVSYSTFPGFVSWRDPKSGSWYVETLDDIFEQWAHSEDLQSLLLRVANAVSVKGIYKQMPGCFNFLRKKLFFKTSASRA

SEQ ID NO: 76 - DNA, 864 bp, Artificial Sequence
  Description of Artificial Sequence: Synthetic polynucleotide
gtcgacggatttggtgatgtcggtgctcttgagagtttgaggggaaatgcagatttggcttacatcctgagcatggagccctgtggccactgcctcattatcaacaatgtgaacttctgccgtgagtccgggctccgcacccgcactggctccaacatcgactgtgagaagttgcggcgtcgcttctcctcgctgcatttcatggtggaggtgaagggcgacctgactgccaagaaaatggtgctggctttgctggagctggcgcggcaggaccacggtgctctggactgctgcgtggtggtcattctctctcacggctgtcaggccagccacctgcagttcccaggggctgtctacggcacagatggatgccctgtgtcggtcgagaagattgtgaacatcttcaatgggaccagctgccccagcctgggagggaagcccaagctctttttcatccaggcctgtggtggggagcagaaagaccatgggtttgaggtggcctccacttcccctgaagacgagtcccctggcagtaaccccgagccagatgccaccccgttccaggaaggtttgaggaccttcgacaagctggacgccatatctagtttgcccacacccagtgacatctttgtgtcctactctactttcccaggttttgtttcctggagggaccccaagagtggctcctggtacgttgagaccctggacgacatctttgagcagtgggctcactctgaagacctgcagtccctcctgcttagggtcgctaatgctgtttcggtgaaagggatttataaacagatgcctggttgctttaatttcctccggaaaaaacttttctttaaaacatcagctagcagagcc

SEQ ID NO: 77 - protein, 288 aa, Artificial Sequence
  Description of Artificial Sequence: Synthetic polypeptide
VDGFGDVGALESLRGNADLAYILSMEPCGHCLIINNVNFCRESGLRTRTGSNIDCEKLRRRFSSLHFMVEVKGDLTAKKMVLALLELARQDHGALDCCVVVILSHGCQASHLQFPGAVYGTDGCPVSVEKIVNIFNGTSCPSLGGKPKLFFIQACGGEQKDHGFEVASTSPEDESPGSNPEPDATPFQEGLRTFDKLDAISSLPTPSDIFVSYSTFPGFVSWRDPKSGSWYVETLDDIFEQWAHSEDLQSLLLRVANAVSVKGIYKQMPGCFNFLRKKLFFKTSASRA

SEQ ID NO: 78 - DNA, 864 bp, Artificial Sequence
  Description of Artificial Sequence: Synthetic polynucleotide
gtcgacggatttggtgatgtcggtgctcttgagagtttgaggggaaatgcagatttggcttacatcctgagcatggagccctgtggccactgcctcattatcaacaatgtgaacttctgccgtgagtccgggctccgcacccgcactggctccaacatcgactgtgagaagttgcggcgtcgcttctcctcgctgcatttcatggtggaggtgaagggcgacctgactgccaagaaaatggtgctggctttgctggagctggcgcggcaggaccacggtgctctggactgctgcgtggtggtcattctctctcacggctgtcaggccagccacctgcagttcccaggggctgtctacggcacagatggatgccctgtgtcggtcgagaagattgtgaacatcttcaatgggaccagctgccccagcctgggagggaagcccaagctctttttcatccaggcctgtggtggggagcagaaagaccatgggtttgaggtggcctccacttcccctgaagacgagtcccctggcagtaaccccgagccagatgccaccccgttccaggaaggtttgaggaccttcgacaggctggacgccatatctagtttgcccacacccagtgacatctttgtgtcctactctactttcccaggttttgtttcctggagggaccccaagagtggctcctggtacgttgagaccctggacgacatctttgagcagtgggctcactctgaagacctgcagtccctcctgcttagggtcgctaatgctgtttcggtgaaagggatttataaacagatgcctggttgctttaatttcctccggaaaaaacttttctttaaaacatcagctagcagagcc

SEQ ID NO: 79 - protein, 288 aa, Artificial Sequence
  Description of Artificial Sequence: Synthetic polypeptide
VDGFGDVGALESLRGNADLAYILSMEPCGHCLIINNVNFCRESGLRTRTGSNIDCEKLRRRFSSLHFMVEVKGDLTAKKMVLALLELARQDHGALDCCVVVILSHGCQASHLQFPGAVYGTDGCPVSVEKIVNIFNGTSCPSLGGKPKLFFIQACGGEQKDHGFEVASTSPEDESPGSNPEPDATPFQEGLRTFDRLDAISSLPTPSDIFVSYSTFPGFVSWRDPKSGSWYVETLDDIFEQWAHSEDLQSLLLRVANAVSVKGIYKQMPGCFNFLRKKLFFKTSASRA

SEQ ID NO: 80 - DNA, 864 bp, Artificial Sequence
  Description of Artificial Sequence: Synthetic polynucleotide
gtcgacggatttggtgatgtcggtgctcttgagagtttgaggggaaatgcagatttggcttacatcctgagcatggagccctgtggccactgcctcattatcaacaatgtgaacttctgccgtgagtccgggctccgcacccgcactggctccaacatcgactgtgagaagttgcggcgtcgcttctcctcgctgcatttcatggtggaggtgaagggcgacctgactgccaagaaaatggtgctggctttgctggagctggcgcggcaggaccacggtgctctggactgctgcgtggtggtcattctctctcacggctgtcaggccagccacctgcagttcccaggggctgtctacggcacagatggatgccctgtgtcggtcgagaagattgtgaacatcttcaatgggaccagctgccccagcctgggagggaagcccaagctctttttcatccaggcctgtggtggggagcagaaagaccatgggtttgaggtggcctccacttcccctgaagacgagtcccctggcagtaaccccgagccagatgccaccccgttccaggaaggtttgaggaccttcgaccagaaggacgccatatctagtttgcccacacccagtgacatctttgtgtcctactctactttcccaggttttgtttcctggagggaccccaagagtggctcctggtacgttgagaccctggacgacatctttgagcagtgggctcactctgaagacctgcagtccctcctgcttagggtcgctaatgctgtttcggtgaaagggatttataaacagatgcctggttgctttaatttcctccggaaaaaacttttctttaaaacatcagctagcagagcc

SEQ ID NO: 81 - protein, 288 aa, Artificial Sequence
  Description of Artificial Sequence: Synthetic polypeptide
VDGFGDVGALESLRGNADLAYILSMEPCGHCLIINNVNFCRESGLRTRTGSNIDCEKLRRRFSSLHFMVEVKGDLTAKKMVLALLELARQDHGALDCCVVVILSHGCQASHLQFPGAVYGTDGCPVSVEKIVNIFNGTSCPSLGGKPKLFFIQACGGEQKDHGFEVASTSPEDESPGSNPEPDATPFQEGLRTFDQKDAISSLPTPSDIFVSYSTFPGFVSWRDPKSGSWYVETLDDIFEQWAHSEDLQSLLLRVANAVSVKGIYKQMPGCFNFLRKKLFFKTSASRA

SEQ ID NO: 82 - DNA, 864 bp, Artificial Sequence
  Description of Artificial Sequence: Synthetic polynucleotide
gtcgacggatttggtgatgtcggtgctcttgagagtttgaggggaaatgcagatttggcttacatcctgagcatggagccctgtggccactgcctcattatcaacaatgtgaacttctgccgtgagtccgggctccgcacccgcactggctccaacatcgactgtgagaagttgcggcgtcgcttctcctcgctgcatttcatggtggaggtgaagggcgacctgactgccaagaaaatggtgctggctttgctggagctggcgcggcaggaccacggtgctctggactgctgcgtggtggtcattctctctcacggctgtcaggccagccacctgcagttcccaggggctgtctacggcacagatggatgccctgtgtcggtcgagaagattgtgaacatcttcaatgggaccagctgccccagcctgggagggaagcccaagctctttttcatccaggcctgtggtggggagcagaaagaccatgggtttgaggtggcctccacttcccctgaagacgagtcccctggcagtaaccccgagccagatgccaccccgttccaggaaggtttgaggaccttcgaccaggaggacgccatatctagtttgcccacacccagtgacatctttgtgtcctactctactttcccaggttttgtttcctggagggaccccaagagtggctcctggtacgttgagaccctggacgacatctttgagcagtgggctcactctgaagacctgcagtccctcctgcttagggtcgctaatgctgtttcggtgaaagggatttataaacagatgcctggttgctttaatttcctccggaaaaaacttttctttaaaacatcagctagcagagcc

SEQ ID NO: 83 - protein, 288 aa, Artificial Sequence
  Description of Artificial Sequence: Synthetic polypeptide
VDGFGDVGALESLRGNADLAYILSMEPCGHCLIINNVNFCRESGLRTRTGSNIDCEKLRRRFSSLHFMVEVKGDLTAKKMVLALLELARQDHGALDCCVVVILSHGCQASHLQFPGAVYGTDGCPVSVEKIVNIFNGTSCPSLGGKPKLFFIQACGGEQKDHGFEVASTSPEDESPGSNPEPDATPFQEGLRTFDQEDAISSLPTPSDIFVSYSTFPGFVSWRDPKSGSWYVETLDDIFEQWAHSEDLQSLLLRVANAVSVKGIYKQMPGCFNFLRKKLFFKTSASRA

SEQ ID NO: 84 - DNA, 864 bp, Artificial Sequence
  Description of Artificial Sequence: Synthetic polynucleotide
gtcgacggatttggtgatgtcggtgctcttgagagtttgaggggaaatgcagatttggcttacatcctgagcatggagccctgtggccactgcctcattatcaacaatgtgaacttctgccgtgagtccgggctccgcacccgcactggctccaacatcgactgtgagaagttgcggcgtcgcttctcctcgctgcatttcatggtggaggtgaagggcgacctgactgccaagaaaatggtgctggctttgctggagctggcgcggcaggaccacggtgctctggactgctgcgtggtggtcattctctctcacggctgtcaggccagccacctgcagttcccaggggctgtctacggcacagatggatgccctgtgtcggtcgagaagattgtgaacatcttcaatgggaccagctgccccagcctgggagggaagcccaagctctttttcatccaggcctgtggtggggagcagaaagaccatgggtttgaggtggcctccacttcccctgaagacgagtcccctggcagtaaccccgagccagatgccaccccgttccaggaaggtttgaggaccttcgaccagggcgacgccatatctagtttgcccacacccagtgacatctttgtgtcctactctactttcccaggttttgtttcctggagggaccccaagagtggctcctggtacgttgagaccctggacgacatctttgagcagtgggctcactctgaagacctgcagtccctcctgcttagggtcgctaatgctgtttcggtgaaagggatttataaacagatgcctggttgctttaatttcctccggaaaaaacttttctttaaaacatcagctagcagagcc

SEQ ID NO: 85 - protein, 288 aa, Artificial Sequence
  Description of Artificial Sequence: Synthetic polypeptide
VDGFGDVGALESLRGNADLAYILSMEPCGHCLIINNVNFCRESGLRTRTGSNIDCEKLRRRFSSLHFMVEVKGDLTAKKMVLALLELARQDHGALDCCVVVILSHGCQASHLQFPGAVYGTDGCPVSVEKIVNIFNGTSCPSLGGKPKLFFIQACGGEQKDHGFEVASTSPEDESPGSNPEPDATPFQEGLRTFDQGDAISSLPTPSDIFVSYSTFPGFVSWRDPKSGSWYVETLDDIFEQWAHSEDLQSLLLRVANAVSVKGIYKQMPGCFNFLRKKLFFKTSASRA

SEQ ID NO: 86 - DNA, 864 bp, Artificial Sequence
  Description of Artificial Sequence: Synthetic polynucleotide
gtcgacggatttggtgatgtcggtgctcttgagagtttgaggggaaatgcagatttggcttacatcctgagcatggagccctgtggccactgcctcattatcaacaatgtgaacttctgccgtgagtccgggctccgcacccgcactggctccaacatcgactgtgagaagttgcggcgtcgcttctcctcgctgcatttcatggtggaggtgaagggcgacctgactgccaagaaaatggtgctggctttgctggagctggcgcggcaggaccacggtgctctggactgctgcgtggtggtcattctctctcacggctgtcaggccagccacctgcagttcccaggggctgtctacggcacagatggatgccctgtgtcggtcgagaagattgtgaacatcttcaatgggaccagctgccccagcctgggagggaagcccaagctctttttcatccaggcctgtggtggggagcagaaagaccatgggtttgaggtggcctccacttcccctgaagacgagtcccctggcagtaaccccgagccagatgccaccccgttccaggaaggtttgaggaccttcgaccagctggccgccatatctagtttgcccacacccagtgacatctttgtgtcctactctactttcccaggttttgtttcctggagggaccccaagagtggctcctggtacgttgagaccctggacgacatctttgagcagtgggctcactctgaagacctgcagtccctcctgcttagggtcgctaatgctgtttcggtgaaagggatttataaacagatgcctggttgctttaatttcctccggaaaaaacttttctttaaaacatcagctagcagagcc

SEQ ID NO: 87 - protein, 288 aa, Artificial Sequence
  Description of Artificial Sequence: Synthetic polypeptide
VDGFGDVGALESLRGNADLAYILSMEPCGHCLIINNVNFCRESGLRTRTGSNIDCEKLRRRFSSLHFMVEVKGDLTAKKMVLALLELARQDHGALDCCVVVILSHGCQASHLQFPGAVYGTDGCPVSVEKIVNIFNGTSCPSLGGKPKLFFIQACGGEQKDHGFEVASTSPEDESPGSNPEPDATPFQEGLRTFDQLAAISSLPTPSDIFVSYSTFPGFVSWRDPKSGSWYVETLDDIFEQWAHSEDLQSLLLRVANAVSVKGIYKQMPGCFNFLRKKLFFKTSASRA

SEQ ID NO: 88 - DNA, 864 bp, Artificial Sequence; identical to SEQ ID NO: 86
  Description of Artificial Sequence: Synthetic polynucleotide

SEQ ID NO: 89 - protein, 288 aa, Artificial Sequence
  Description of Artificial Sequence: Synthetic polypeptide
VDGFGDVGALESLRGNADLAYILSMEPCGHCLIINNVNFCRESGLRTRTGSNIDCEKLRRRFSSLHFMVEVKGDLTAKKMVLALLELARQDHGALDCCVVVILSHGCQASHLQFPGAVYGTDGCPVSVEKIVNIFNGTSCPSLGGKPKLFFIQACGGEQKDHGFEVASTSPEDESPGSNPEPDATPFQEGLRTFDQLEAISSLPTPSDIFVSYSTFPGFVSWRDPKSGSWYVETLDDIFEQWAHSEDLQSLLLRVANAVSVKGIYKQMPGCFNFLRKKLFFKTSASRA

SEQ ID NO: 90 - DNA, 864 bp, Artificial Sequence; identical to SEQ ID NO: 86
  Description of Artificial Sequence: Synthetic polynucleotide

SEQ ID NO: 91 - protein, 288 aa, Artificial Sequence
  Description of Artificial Sequence: Synthetic polypeptide
VDGFGDVGALESLRGNADLAYILSMEPCGHCLIINNVNFCRESGLRTRTGSNIDCEKLRRRFSSLHFMVEVKGDLTAKKMVLALLELARQDHGALDCCVVVILSHGCQASHLQFPGAVYGTDGCPVSVEKIVNIFNGTSCPSLGGKPKLFFIQACGGEQKDHGFEVASTSPEDESPGSNPEPDATPFQEGLRTFDQLNAISSLPTPSDIFVSYSTFPGFVSWRDPKSGSWYVETLDDIFEQWAHSEDLQSLLLRVANAVSVKGIYKQMPGCFNFLRKKLFFKTSASRA

SEQ ID NO: 92 - DNA, 864 bp, Artificial Sequence; identical to SEQ ID NO: 86
  Description of Artificial Sequence: Synthetic polynucleotide

SEQ ID NO: 93 - protein, 288 aa, Artificial Sequence
  Description of Artificial Sequence: Synthetic polypeptide
VDGFGDVGALESLRGNADLAYILSMEPCGHCLIINNVNFCRESGLRTRTGSNIDCEKLRRRFSSLHFMVEVKGDLTAKKMVLALLELARQDHGALDCCVVVILSHGCQASHLQFPGAVYGTDGCPVSVEKIVNIFNGTSCPSLGGKPKLFFIQACGGEQKDHGFEVASTSPEDESPGSNPEPDATPFQEGLRTFDQLVAISSLPTPSDIFVSYSTFPGFVSWRDPKSGSWYVETLDDIFEQWAHSEDLQSLLLRVANAVSVKGIYKQMPGCFNFLRKKLFFKTSASRA

SEQ ID NO: 94 - DNA, 864 bp, Artificial Sequence; identical to SEQ ID NO: 86
  Description of Artificial Sequence: Synthetic polynucleotide

SEQ ID NO: 95 - protein, 288 aa, Artificial Sequence
  Description of Artificial Sequence: Synthetic polypeptide
VDGFGDVGALESLRGNADLAYILSMEPCGHCLIINNVNFCRESGLRTRTGSNIDCEKLRRRFSSLHFMVEVKGDLTAKKMVLALLELARQDHGALDCCVVVILSHGCQASHLQFPGAVYGTDGCPVSVEKIVNIFNGTSCPSLGGKPKLFFIQACGGEQKDHGFEVASTSPEDESPGSNPEPDATPFQEGLRTFDQLGAISSLPTPSDIFVSYSTFPGFVSWRDPKSGSWYVETLDDIFEQWAHSEDLQSLLLRVANAVSVKGIYKQMPGCFNFLRKKLFFKTSASRA

SEQ ID NO: 96 - DNA, 864 bp, Artificial Sequence; identical to SEQ ID NO: 86
  Description of Artificial Sequence: Synthetic polynucleotide

SEQ ID NO: 97 - protein, 288 aa, Artificial Sequence
  Description of Artificial Sequence: Synthetic polypeptide
VDGFGDVGALESLRGNADLAYILSMEPCGHCLIINNVNFCRESGLRTRTGSNIDCEKLRRRFSSLHFMVEVKGDLTAKKMVLALLELARQDHGALDCCVVVILSHGCQASHLQFPGAVYGTDGCPVSVEKIVNIFNGTSCPSLGGKPKLFFIQACGGEQKDHGFEVASTSPEDESPGSNPEPDATPFQEGLRTFDQLSAISSLPTPSDIFVSYSTFPGFVSWRDPKSGSWYVETLDDIFEQWAHSEDLQSLLLRVANAVSVKGIYKQMPGCFNFLRKKLFFKTSASRA

SEQ ID NO: 98 - DNA, 864 bp, Artificial Sequence
  Description of Artificial Sequence: Synthetic polynucleotide
gtcgacggatttggtgatgtcggtgctcttgagagtttgaggggaaatgcagatttggcttacatcctgagcatggagccctgtggccactgcctcattatcaacaatgtgaacttctgccgtgagtccgggctccgcacccgcactggctccaacatcgactgtgagaagttgcggcgtcgcttctcctcgctgcatttcatggtggaggtgaagggcgacctgactgccaagaaaatggtgctggctttgctggagctggcgcggcaggaccacggtgctctggactgctgcgtggtggtcattctctctcacggctgtcaggccagccacctgcagttcccaggggctgtctacggcacagatggatgccctgtgtcggtcgagaagattgtgaacatcttcaatgggaccagctgccccagcctgggagggaagcccaagctctttttcatccaggcctgtggtggggagcagaaagaccatgggtttgaggtggcctccacttcccctgaagacgagtcccctggcagtaaccccgagccagatgccaccccgttccaggaaggtttgaggaccttcgaccagctggacaagatatctagtttgcccacacccagtgacatctttgtgtcctactctactttcccaggttttgtttcctggagggaccccaagagtggctcctggtacgttgagaccctggacgacatctttgagcagtgggctcactctgaagacctgcagtccctcctgcttagggtcgctaatgctgtttcggtgaaagggatttataaacagatgcctggttgctttaatttcctccggaaaaaacttttctttaaaacatcagctagcagagcc

SEQ ID NO: 99 - protein, 288 aa, Artificial Sequence
  Description of Artificial Sequence: Synthetic polypeptide
VDGFGDVGALESLRGNADLAYILSMEPCGHCLIINNVNFCRESGLRTRTGSNIDCEKLRRRFSSLHFMVEVKGDLTAKKMVLALLELARQDHGALDCCVVVILSHGCQASHLQFPGAVYGTDGCPVSVEKIVNIFNGTSCPSLGGKPKLFFIQACGGEQKDHGFEVASTSPEDESPGSNPEPDATPFQEGLRTFDQLDKISSLPTPSDIFVSYSTFPGFVSWRDPKSGSWYVETLDDIFEQWAHSEDLQSLLLRVANAVSVKGIYKQMPGCFNFLRKKLFFKTSASRA

SEQ ID NO: 100 - DNA, 864 bp, Artificial Sequence
  Description of Artificial Sequence: Synthetic polynucleotide
gtcgacggatttggtgatgtcggtgctcttgagagtttgaggggaaatgcagatttggcttacatcctgagcatggagccctgtggccactgcctcattatcaacaatgtgaacttctgccgtgagtccgggctccgcacccgcactggctccaacatcgactgtgagaagttgcggcgtcgcttctcctcgctgcatttcatggtggaggtgaagggcgacctgactgccaagaaaatggtgctggctttgctggagctggcgcggcaggaccacggtgctctggactgctgcgtggtggtcattctctctcacggctgtcaggccagccacctgcagttcccaggggctgtctacggcacagatggatgccctgtgtcggtcgagaagattgtgaacatcttcaatgggaccagctgccccagcctgggagggaagcccaagctctttttcatccaggcctgtggtggggagcagaaagaccatgggtttgaggtggcctccacttcccctgaagacgagtcccctggcagtaaccccgagccagatgccaccccgttccaggaaggtttgaggaccttcgaccagctggacgccatatctagtttgcccacacccagtgacatctttgtgtcctactctactttcccaggttttgtttcctggagggaccccaagagtggctcctggtacgttgagaccctggacgacatctttgagcagtgggctcactctgaagacctgcagtccctcctgcttagggtcgctaatgctgtttcggtgaaagggatttataaacagatgcctggttgctataatttcctccggaaaaaacttttctttaaaacatcagctagcagagcc

SEQ ID NO: 101 - protein, 288 aa, Artificial Sequence
  Description of Artificial Sequence: Synthetic polypeptide
VDGFGDVGALESLRGNADLAYILSMEPCGHCLIINNVNFCRESGLRTRTGSNIDCEKLRRRFSSLHFMVEVKGDLTAKKMVLALLELARQDHGALDCCVVVILSHGCQASHLQFPGAVYGTDGCPVSVEKIVNIFNGTSCPSLGGKPKLFFIQACGGEQKDHGFEVASTSPEDESPGSNPEPDATPFQEGLRTFDQLDAISSLPTPSDIFVSYSTFPGFVSWRDPKSGSWYVETLDDIFEQWAHSEDLQSLLLRVANAVSVKGIYKQMPGCYNFLRKKLFFKTSASRA

SEQ ID NO: 102 - DNA, 864 bp, Artificial Sequence
  Description of Artificial Sequence: Synthetic polynucleotide
gtcgacggatttggtgatgtcggtgctcttgagagtttgaggggaaatgcagatttggcttacatcctgagcatggagccctgtggccactgcctcattatcaacaatgtgaacttctgccgtgagtccgggctccgcacccgcactggctccaacatcgactgtgagaagttgcggcgtcgcttctcctcgctgcatttcatggtggaggtgaagggcgacctgactgccaagaaaatggtgctggctttgctggagctggcgcggcaggaccacggtgctctggactgctgcgtggtggtcattctctctcacggctgtcaggccagccacctgcagttcccaggggctgtctacggcacagatggatgccctgtgtcggtcgagaagattgtgaacatcttcaatgggaccagctgccccagcctgggagggaagcccaagctctttttcatccaggcctgtggtggggagcagaaagaccatgggtttgaggtggcctccacttcccctgaagacgagtcccctggcagtaaccccgagccagatgccaccccgttccaggaaggtttgaggaccttcgaccagctggacgccatatctagtttgcccacacccagtgacatctttgtgtcctactctactttcccaggttttgtttcctggagggaccccaagagtggctcctggtacgttgagaccctggacgacatctttgagcagtgggctcactctgaagacctgcagtccctcctgcttagggtcgctaatgctgtttcggtgaaagggatttataaacagatgcctggttgctggaatttcctccggaaaaaacttttctttaaaacatcagctagcagagcc

SEQ ID NO: 103 - protein, 288 aa, Artificial Sequence
  Description of Artificial Sequence: Synthetic polypeptide
VDGFGDVGALESLRGNADLAYILSMEPCGHCLIINNVNFCRESGLRTRTGSNIDCEKLRRRFSSLHFMVEVKGDLTAKKMVLALLELARQDHGALDCCVVVILSHGCQASHLQFPGAVYGTDGCPVSVEKIVNIFNGTSCPSLGGKPKLFFIQACGGEQKDHGFEVASTSPEDESPGSNPEPDATPFQEGLRTFDQLDAISSLPTPSDIFVSYSTFPGFVSWRDPKSGSWYVETLDDIFEQWAHSEDLQSLLLRVANAVSVKGIYKQMPGCWNFLRKKLFFKTSASRA

SEQ ID NO: 104 - DNA, 864 bp, Artificial Sequence
  Description of Artificial Sequence: Synthetic polynucleotide
gtcgacggatttggtgatgtcggtgctcttgagagtttgaggggaaatgcagatttggcttacatcctgagcatggagccctgtggccactgcctcattatcaacaatgtgaacttctgccgtgagtccgggctccgcacccgcactggctccaacatcgactgtgagaagttgcggcgtcgcttctcctcgctgcatttcatggtggaggtgaagggcgacctgactgccaagaaaatggtgctggctttgctggagctggcgcggcaggaccacggtgctctggactgctgcgtggtggtcattctctctcacggctgtcaggccagccacctgcagttcccaggggctgtctacggcacagatggatgccctgtgtcggtcgagaagattgtgaacatcttcaatgggaccagctgccccagcctgggagggaagcccaagctctttttcatccaggcctgtggtggggagcagaaagaccatgggtttgaggtggcctccacttcccctgaagacgagtcccctggcagtaaccccgagccagatgccaccccgttccaggaaggtttgaggaccttcgaccagctggacgccatatctagtttgcccacacccagtgacatctttgtgtcctactctactttcccaggttttgtttcctggagggaccccaagagtggctcctggtacgttgagaccctggacgacatctttgagcagtgggctcactctgaagacctgcagtccctcctgcttagggtcgctaatgctgtttcggtgaaagggatttataaacagatgcctggttgctttcagttcctccggaaaaaacttttctttaaaacatcagctagcagagcc

SEQ ID NO: 105 - protein, 288 aa, Artificial Sequence; identical to SEQ ID NO: 40
  Description of Artificial Sequence: Synthetic polypeptide

SEQ ID NO: 106 - DNA, 864 bp, Artificial Sequence; identical to SEQ ID NO: 39
  Description of Artificial Sequence: Synthetic polynucleotide

SEQ ID NO: 107 - protein, 288 aa, Artificial Sequence; identical to SEQ ID NO: 40
  Description of Artificial Sequence: Synthetic polypeptide

SEQ ID NO: 108 - DNA, 864 bp, Artificial Sequence
  Description of Artificial Sequence: Synthetic polynucleotide
gtcgacggatttggtgatgtcggtgctcttgagagtttgaggggaaatgcagatttggcttacatcctgagcatggagccctgtggccactgcctcattatcaacaatgtgaacttctgccgtgagtccgggctccgcacccgcactggctccaacatcgactgtgagaagttgcggcgtcgcttctcctcgctgcatttcatggtggaggtgaagggcgacctgactgccaagaaaatggtgctggctttgctggagctggcgcggcaggaccacggtgctctggactgctgcgtggtggtcattctctctcacggctgtcaggccagccacctgcagttcccaggggctgtctacggcacagatggatgccctgtgtcggtcgagaagattgtgaacatcttcaatgggaccagctgccccagcctgggagggaagcccaagctctttttcatccaggcctgtggtggggagcagaaagaccatgggtttgaggtggcctccacttcccctgaagacgagtcccctggcagtaaccccgagccagatgccaccccgttccaggaaggtttgaggaccttcgaccagctggacgccatatctagtttgcccacacccagtgacatctttgtgtcctactctactttcccaggttttgtttcctggagggaccccaagagtggctcctggtacgttgagaccctggacgacatctttgagcagtgggctcactctgaagacctgcagtccctcctgcttagggtcgctaatgctgtttcggtgaaagggatttataaacagatgcctggttgctttaatctcctccggaaaaaacttttctttaaaacatcagctagcagagcc

SEQ ID NO: 109 - protein, 288 aa, Artificial Sequence
  Description of Artificial Sequence: Synthetic polypeptide
VDGFGDVGALESLRGNADLAYILSMEPCGHCLIINNVNFCRESGLRTRTGSNIDCEKLRRRFSSLHFMVEVKGDLTAKKMVLALLELARQDHGALDCCVVVILSHGCQASHLQFPGAVYGTDGCPVSVEKIVNIFNGTSCPSLGGKPKLFFIQACGGEQKDHGFEVASTSPEDESPGSNPEPDATPFQEGLRTFDQLDAISSLPTPSDIFVSYSTFPGFVSWRDPKSGSWYVETLDDIFEQWAHSEDLQSLLLRVANAVSVKGIYKQMPGCFNLLRKKLFFKTSASRA

SEQ ID NO: 110 - DNA, 864 bp, Artificial Sequence
  Description of Artificial Sequence: Synthetic polynucleotide
gtcgacggatttggtgatgtcggtgctcttgagagtttgaggggaaatgcagatttggcttacatcctgagcatggagccctgtggccactgcctcattatcaacaatgtgaacttctgccgtgagtccgggctccgcacccgcactggctccaacatcgactgtgagaagttgcggcgtcgcttctcctcgctgcatttcatggtggaggtgaagggcgacctgactgccaagaaaatggtgctggctttgctggagctggcgcggcaggaccacggtgctctggactgctgcgtggtggtcattctctctcacggctgtcaggccagccacctgcagttcccaggggctgtctacggcacagatggatgccctgtgtcggtcgagaagattgtgaacatcttcaatgggaccagctgccccagcctgggagggaagcccaagctctttttcatccaggcctgtggtggggagcagaaagaccatgggtttgaggtggcctccacttcccctgaagacgagtcccctggcagtaaccccgagccagatgccaccccgttccaggaaggtttgaggaccttcgaccagctggacgccatatctagtttgcccacacccagtgacatctttgtgtcctactctactttcccaggttttgtttcctggagggaccccaagagtggctcctggtacgttgagaccctggacgacatctttgagcagtgggctcactctgaagacctgcagtccctcctgcttagggtcgctaatgctgtttcggtgaaagggatttataaacagatgcctggttgctttaattccctccggaaaaaacttttctttaaaacatcagctagcagagcc

SEQ ID NO: 111 - protein, 288 aa, Artificial Sequence
  Description of Artificial Sequence: Synthetic polypeptide
VDGFGDVGALESLRGNADLAYILSMEPCGHCLIINNVNFCRESGLRTRTGSNIDCEKLRRRFSSLHFMVEVKGDLTAKKMVLALLELARQDHGALDCCVVVILSHGCQASHLQFPGAVYGTDGCPVSVEKIVNIFNGTSCPSLGGKPKLFFIQACGGEQKDHGFEVASTSPEDESPGSNPEPDATPFQEGLRTFDQLDAISSLPTPSDIFVSYSTFPGFVSWRDPKSGSWYVETLDDIFEQWAHSEDLQSLLLRVANAVSVKGIYKQMPGCFNTLRKKLFFKTSASRA

SEQ ID NO: 112 - DNA, 864 bp, Artificial Sequence
  Description of Artificial Sequence: Synthetic polynucleotide
gtggacgggtttggagatgtgggagccctggaagccctgcggggcaatgccgatctggcttacatcctgtctatggagccttgcggccactgtctgatcattaacaatgtgaacttctgcagagagagcgggctgcggaccagaacaggatccaatattgactgtgaaaagctgcggagaaggttctctagtctgcactttatggtcgaggtgaaaggcgatctgaccgctaagaaaatggtgctggccctgctggaactggctcggcaggaccatggggcactggattgctgcgtggtcgtgatcctgagtcacggctgccaggcttcacatctgcagttccctggggcagtctatggaactgacggctgtccagtcagcgtggagaagatcgtgaacatcttcaacggcacctcttgcccaagtctgggcgggaagcccaaactgttctttattcaggcctgtggaggcgagcagaaagatcacggcttcgaagtggctagcacctcccccgaggacgaatcacctggaagcaaccctgagccagatgcaacccccttccaggaaggcctgaggacatttgaccagctggatgccatctcaagcctgcccacaccttctgacattttcgtctcttacagtactttccctggatttgtgagctggcgcgatccaaagtcaggcagctggtacgtggagacactggacgatatctttgagcagtgggcccattctgaagacctgcagagtctgctgctgcgagtggccaatgctgtctctgtgaaggggatctacaaacagatgccaggatgcttccagtttctgagaaagaaactgttctttaagacctccgcatctagggcc

SEQ ID NO: 113 - protein, 288 aa, Artificial Sequence
  Description of Artificial Sequence: Synthetic polypeptide
VDGFGDVGALEALRGNADLAYILSMEPCGHCLIINNVNFCRESGLRTRTGSNIDCEKLRRRFSSLHFMVEVKGDLTAKKMVLALLELARQDHGALDCCVVVILSHGCQASHLQFPGAVYGTDGCPVSVEKIVNIFNGTSCPSLGGKPKLFFIQACGGEQKDHGFEVASTSPEDESPGSNPEPDATPFQEGLRTFDQLDAISSLPTPSDIFVSYSTFPGFVSWRDPKSGSWYVETLDDIFEQWAHSEDLQSLLLRVANAVSVKGIYKQMPGCFQFLRKKLFFKTSASRA

SEQ ID NO: 114 - DNA, 864 bp, Artificial Sequence
  Description of Artificial Sequence: Synthetic polynucleotide
gtcgacggatttggtgatgtcggtgctcttgaggctttgaggggaaatgcagatttggcttacatcctgagcatggagccctgtggccactgcctcattatcaacaatgtgaacttctgccgtgagtccgggctccgcacccgcactggctccaacatcgactgtgagaagttgcggcgtcgcttctcctcgctgcatttcatggtggaggtgaagggcgacctgactgccaagaaaatggtgctggctttgctggagctggcgcggcaggaccacggtgctctggactgctgcgtggtggtcattctctctcacggctgtcaggccagccacctgcagttcccaggggctgtctacggcacagatggatgccctgtgtcggtcgagaagattgtgaacatcttcaatgggaccagctgccccagcctgggagggaagcccaagctctttttcatccaggcctgtggtggggagcagaaagaccatgggtttgaggtggcctccacttcccctgaagacgagtcccctggcagtaaccccgagccagatgccaccccgttccaggaaggtttgaggaccttcgaccagctggccgccatatctagtttgcccacacccagtgacatctttgtgtcctactctactttcccaggttttgtttcctggagggaccccaagagtggctcctggtacgttgagaccctggacgacatctttgagcagtgggctcactctgaagacctgcagtccctcctgcttagggtcgctaatgctgtttcggtgaaagggatttataaacagatgcctggttgctttaatttcctccggaaaaaacttttctttaaaacatcagctagcagagcc

SEQ ID NO: 115 - protein, 288 aa, Artificial Sequence
  Description of Artificial Sequence: Synthetic polypeptide
VDGFGDVGALEALRGNADLAYILSMEPCGHCLIINNVNFCRESGLRTRTGSNIDCEKLRRRFSSLHFMVEVKGDLTAKKMVLALLELARQDHGALDCCVVVILSHGCQASHLQFPGAVYGTDGCPVSVEKIVNIFNGTSCPSLGGKPKLFFIQACGGEQKDHGFEVASTSPEDESPGSNPEPDATPFQEGLRTFDQLAAISSLPTPSDIFVSYSTFPGFVSWRDPKSGSWYVETLDDIFEQWAHSEDLQSLLLRVANAVSVKGIYKQMPGCFNFLRKKLFFKTSASRA

SEQ ID NO: 116 - DNA, 864 bp, Artificial Sequence
  Description of Artificial Sequence: Synthetic polynucleotide
gtcgacggatttggtgatgtcggtgctcttgaggacttgaggggaaatgcagatttggcttacatcctgagcatggagccctgtggccactgcctcattatcaacaatgtgaacttctgccgtgagtccgggctccgcacccgcactggctccaacatcgactgtgagaagttgcggcgtcgcttctcctcgctgcatttcatggtggaggtgaagggcgacctgactgccaagaaaatggtgctggctttgctggagctggcgcggcaggaccacggtgctctggactgctgcgtggtggtcattctctctcacggctgtcaggccagccacctgcagttcccaggggctgtctacggcacagatggatgccctgtgtcggtcgagaagattgtgaacatcttcaatgggaccagctgccccagcctgggagggaagcccaagctctttttcatccaggcctgtggtggggagcagaaagaccatgggtttgaggtggcctccacttcccctgaagacgagtcccctggcagtaaccccgagccagatgccaccccgttccaggaaggtttgaggaccttcgaccagctggccgccatatctagtttgcccacacccagtgacatctttgtgtcctactctactttcccaggttttgtttcctggagggaccccaagagtggctcctggtacgttgagaccctggacgacatctttgagcagtgggctcactctgaagacctgcagtccctcctgcttagggtcgctaatgctgtttcggtgaaagggatttataaacagatgcctggttgctttaatttcctccggaaaaaacttttctttaaaacatcagctagcagagcc

SEQ ID NO: 117 - protein, 288 aa, Artificial Sequence
  Description of Artificial Sequence: Synthetic polypeptide
VDGFGDVGALEDLRGNADLAYILSMEPCGHCLIINNVNFCRESGLRTRTGSNIDCEKLRRRFSSLHFMVEVKGDLTAKKMVLALLELARQDHGALDCCVVVILSHGCQASHLQFPGAVYGTDGCPVSVEKIVNIFNGTSCPSLGGKPKLFFIQACGGEQKDHGFEVASTSPEDESPGSNPEPDATPFQEGLRTFDQLAAISSLPTPSDIFVSYSTFPGFVSWRDPKSGSWYVETLDDIFEQWAHSEDLQSLLLRVANAVSVKGIYKQMPGCFNFLRKKLFFKTSASRA

SEQ ID NO: 118 - DNA, 864 bp, Artificial Sequence
  Description of Artificial Sequence: Synthetic polynucleotide
gtcgacggatttggtgatgtcggtgctcttgagagtttgaggggaaatgcagatttggcttacatcctgagcatggagccctgtggccactgcctcattatcaacaatgtgaacttctgccgtgagtccgggctccgcacccgcactggctccaacatcgactgtgagaagttgcggcgtcgcttctccgcgctgcatttcatggtggaggtgaagggcgacctgactgccaagaaaatggtgctggctttgctggagctggcgcggcaggaccacggtgctctggactgctgcgtggtggtcattctctctcacggctgtcaggccagccacctgcagttcccaggggctgtctacggcacagatggatgccctgtgtcggtcgagaagattgtgaacatcttcaatgggaccagctgccccagcctgggagggaagcccaagctctttttcatccaggcctgtggtggggagcagaaagaccatgggtttgaggtggcctccacttcccctgaagacgagtcccctggcagtaaccccgagccagatgccaccccgttccaggaaggtttgaggaccttcgaccagctggccgccatatctagtttgcccacacccagtgacatctttgtgtcctactctactttcccaggttttgtttcctggagggaccccaagagtggctcctggtacgttgagaccctggacgacatctttgagcagtgggctcactctgaagacctgcagtccctcctgcttagggtcgctaatgctgtttcggtgaaagggatttataaacagatgcctggttgctttaatttcctccggaaaaaacttttctttaaaacatcagctagcagagcc

SEQ ID NO: 119 - protein, 288 aa, Artificial Sequence
  Description of Artificial Sequence: Synthetic polypeptide
VDGFGDVGALESLRGNADLAYILSMEPCGHCLIINNVNFCRESGLRTRTGSNIDCEKLRRRFSALHFMVEVKGDLTAKKMVLALLELARQDHGALDCCVVVILSHGCQASHLQFPGAVYGTDGCPVSVEKIVNIFNGTSCPSLGGKPKLFFIQACGGEQKDHGFEVASTSPEDESPGSNPEPDATPFQEGLRTFDQLAAISSLPTPSDIFVSYSTFPGFVSWRDPKSGSWYVETLDDIFEQWAHSEDLQSLLLRVANAVSVKGIYKQMPGCFNFLRKKLFFKTSASRA

SEQ ID NO: 120 - DNA, 864 bp, Artificial Sequence
  Description of Artificial Sequence: Synthetic polynucleotide
gtcgacggatttggtgatgtcggtgctcttgagagtttgaggggaaatgcagatttggcttacatcctgagcatggagccctgtggccactgcctcattatcaacaatgtgaacttctgccgtgagtccgggctccgcacccgcactggctccaacatcgactgtgagaagttgcggcgtcgcttctccgacctgcatttcatggtggaggtgaagggcgacctgactgccaagaaaatggtgctggctttgctggagctggcgcggcaggaccacggtgctctggactgctgcgtggtggtcattctctctcacggctgtcaggccagccacctgcagttcccaggggctgtctacggcacagatggatgccctgtgtcggtcgagaagattgtgaacatcttcaatgggaccagctgccccagcctgggagggaagcccaagctctttttcatccaggcctgtggtggggagcagaaagaccatgggtttgaggtggcctccacttcccctgaagacgagtcccctggcagtaaccccgagccagatgccaccccgttccaggaaggtttgaggaccttcgaccagctggccgccatatctagtttgcccacacccagtgacatctttgtgtcctactctactttcccaggttttgtttcctggagggaccccaagagtggctcctggtacgttgagaccctggacgacatctttgagcagtgggctcactctgaagacctgcagtccctcctgcttagggtcgctaatgctgtttcggtgaaagggatttataaacagatgcctggttgctttaatttcctccggaaaaaacttttctttaaaacatcagctagcagagcc

SEQ ID NO: 121 - protein, 288 aa, Artificial Sequence
  Description of Artificial Sequence: Synthetic polypeptide
VDGFGDVGALESLRGNADLAYILSMEPCGHCLIINNVNFCRESGLRTRTGSNIDCEKLRRRFSDLHFMVEVKGDLTAKKMVLALLELARQDHGALDCCVVVILSHGCQASHLQFPGAVYGTDGCPVSVEKIVNIFNGTSCPSLGGKPKLFFIQACGGEQKDHGFEVASTSPEDESPGSNPEPDATPFQEGLRTFDQLAAISSLPTPSDIFVSYSTFPGFVSWRDPKSGSWYVETLDDIFEQWAHSEDLQSLLLRVANAVSVKGIYKQMPGCFNFLRKKLFFKTSASRA

SEQ ID NO: 122 - DNA, 864 bp, Artificial Sequence
  Description of Artificial Sequence: Synthetic polynucleotide
gtggacgggtttggagatgtgggagccctggaatccctgcggggcaatgccgatctggcttacatcctgtctatggagccttgcggccactgtctgatcattaacaatgtgaacttctgcagagagagcgggctgcggaccagaacaggatccaatattgactgtgaaaagctgcggagaaggttctctagtctgcactttatggtcgaggtgaaaggcgatctgaccgctaagaaaatggtgctggccctgctggaactggctcggcaggaccatggggcactggattgctgcgtggtcgtgatcctgagtcacggctgccaggcttcacatctgcagttccctggggcagtctatggaactgacggctgtccagtcagcgtggagaagatcgtgaacatcttcaacggcacctcttgcccaagtctgggcgggaagcccaaactgttctttattcaggcctgtggaggcgagcagaaagatcacggcttcgaagtggctagcacctcccccgaggacgaatcacctggaagcaaccctgagccagatgcaagccccttccaggaaggcctgaggacatttgaccagctggatgccatctcaagcctgcccacaccttctgacattttcgtctcttacagtactttccctggatttgtgagctggcgcgatccaaagtcaggcagctggtacgtggagacactggacgatatctttgagcagtgggcccattctgaagacctgcagagtctgctgctgcgagtggccaatgctgtctctgtgaaggggatctacaaacagatgccaggatgcttccagtttctgagaaagaaactgttctttaagacctccgcatctagggcc

SEQ ID NO: 123 - protein, 288 aa, Artificial Sequence
  Description of Artificial Sequence: Synthetic polypeptide
VDGFGDVGALESLRGNADLAYILSMEPCGHCLIINNVNFCRESGLRTRTGSNIDCEKLRRRFSSLHFMVEVKGDLTAKKMVLALLELARQDHGALDCCVVVILSHGCQASHLQFPGAVYGTDGCPVSVEKIVNIFNGTSCPSLGGKPKLFFIQACGGEQKDHGFEVASTSPEDESPGSNPEPDASPFQEGLRTFDQLDAISSLPTPSDIFVSYSTFPGFVSWRDPKSGSWYVETLDDIFEQWAHSEDLQSLLLRVANAVSVKGIYKQMPGCFQFLRKKLFFKTSASRA

SEQ ID NO: 124 - DNA, 864 bp, Artificial Sequence
  Description of Artificial Sequence: Synthetic polynucleotide
gtcgacggatttggtgatgtcggtgctcttgagagtttgaggggaaatgcagatttggcttacatcctgagcatggagccctgtggccactgcctcattatcaacaatgtgaacttctgccgtgagtccgggctccgcacccgcactggctccaacatcgactgtgagaagttgcggcgtcgcttctcctcgctgcatttcatggtggaggtgaagggcgacctgactgccaagaaaatggtgctggctttgctggagctggcgcggcaggaccacggtgctctggactgctgcgtggtggtcattctctctcacggctgtcaggccagccacctgcagttcccaggggctgtctacggcacagatggatgccctgtgtcggtcgagaagattgtgaacatcttcaatgggaccagctgccccagcctgggagggaagcccaagctctttttcatccaggcctgtggtggggagcagaaagaccatgggtttgaggtggcctccacttcccctgaagacgagtcccctggcagtaaccccgagccagatgccaccccgttccaggaaggtttgaggaccttcgaccagctggccgccatatctagtttgcccacacccagtgacatctttgtgtcctactctactttcccaggttttgtttcctggagggaccccaagagtggctcctggtacgttgagaccctggacgacatctttgagcagtgggctcactctgaagacctgcagtccctcctgcttagggtcgctaatgctgtttcggtgaaagggatttataaacagatgcctggttgcttcagtttcctccggaaaaaacttttctttaaaacatcagctagcagagcc

SEQ ID NO: 125 - protein, 288 aa, Artificial Sequence
  Description of Artificial Sequence: Synthetic polypeptide
VDGFGDVGALESLRGNADLAYILSMEPCGHCLIINNVNFCRESGLRTRTGSNIDCEKLRRRFSSLHFMVEVKGDLTAKKMVLALLELARQDHGALDCCVVVILSHGCQASHLQFPGAVYGTDGCPVSVEKIVNIFNGTSCPSLGGKPKLFFIQACGGEQKDHGFEVASTSPEDESPGSNPEPDATPFQEGLRTFDQLAAISSLPTPSDIFVSYSTFPGFVSWRDPKSGSWYVETLDDIFEQWAHSEDLQSLLLRVANAVSVKGIYKQMPGCFQFLRKKLFFKTSASRA

SEQ ID NO: 126 - DNA, 864 bp, Artificial Sequence
  Description of Artificial Sequence: Synthetic polynucleotide
gtcgacggatttggtgatgtcggtgctcttgagagtttgaggggaaatgcagatttggcttacatcctgagcatggagccctgtggccactgcctcattatcaacaatgtgaacttctgccgtgagtccgggctccgcacccgcactggctccaacatcgactgtgagaagttgcggcgtcgcttctcctcgctgcatttcatggtggaggtgaagggcgacctgactgccaagaaaatggtgctggctttgctggagctggcgcggcaggaccacggtgctctggactgctgcgtggtggtcattctctctcacggctgtcaggccagccacctgcagttcccaggggctgtctacggcacagatggatgccctgtgtcggtcgagaagattgtgaacatcttcaatgggaccagctgccccagcctgggagggaagcccaagctctttttcatccaggcctgtggtggggagcagaaagaccatgggtttgaggtggcctccacttcccctgaagacgagtcccctggcagtaaccccgagccagatgccgtgcccatccaggaaggtttgaggaccttcgaccagctggacgccatatctagtttgcccacacccagtgacatctttgtgtcctactctactttcccaggttttgtttcctggagggaccccaagagtggctcctggtacgttgagaccctggacgacatctttgagcagtgggctcactctgaagacctgcagtccctcctgcttagggtcgctaatgctgtttcggtgaaagggatttataaacagatgcctggttgctttaatttcctccggaaaaaacttttctttaaaacatcagctagcagagcc

SEQ ID NO: 127 - protein, 288 aa, Artificial Sequence
  Description of Artificial Sequence: Synthetic polypeptide
VDGFGDVGALESLRGNADLAYILSMEPCGHCLIINNVNFCRESGLRTRTGSNIDCEKLRRRFSSLHFMVEVKGDLTAKKMVLALLELARQDHGALDCCVVVILSHGCQASHLQFPGAVYGTDGCPVSVEKIVNIFNGTSCPSLGGKPKLFFIQACGGEQKDHGFEVASTSPEDESPGSNPEPDAVPIQEGLRTFDQLDAISSLPTPSDIFVSYSTFPGFVSWRDPKSGSWYVETLDDIFEQWAHSEDLQSLLLRVANAVSVKGIYKQMPGCFNFLRKKLFFKTSASRA

SEQ ID NO: 128 - DNA, 864 bp, Artificial Sequence
  Description of Artificial Sequence: Synthetic polynucleotide
gtcgacggatttggtgatgtcggtgctcttgagagtttgaggggaaatgcagatttggcttacatcctgagcatggagccctgtggccactgcctcattatcaacaatgtgaacttctgccgtgagtccgggctccgcacccgcactggctccaacatcgactgtgagaagttgcggcgtcgcttctcctcgctgcatttcatggtggaggtgaagggcgacctgactgccaagaaaatggtgctggctttgctggagctggcgcggcaggaccacggtgctctggactgctgcgtggtggtcattctctctcacggctgtcaggccagccacctgcagttcccaggggctgtctacggcacagatggatgccctgtgtcggtcgagaagattgtgaacatcttcaatgggaccagctgccccagcctgggagggaagcccaagctctttttcatccaggcctgtggtggggagcagaaagaccatgggtttgaggtggcctccacttcccctgaagacgagtcccctggcagtaaccccgagccagatgccaccccgttccaggaaggtttgaggaccttcgaccagctggacgccatatctagtttgcccacacccagtgacatctttgtgtcctactctactttcccaggttttgtttcctggagggaccccaagagtggctcctggtacgttgagaccctggacgacatctttgagcagtgggctcactctgaagacctgcagtccctcctgcttagggtcgctaatgctgtttcggtgaaagggatttataaacagatgccgatatccgcacagacactccggaaaaaacttttctttaaaacatcagctagcagagcc

SEQ ID NO: 129 - protein, 288 aa, Artificial Sequence
  Description of Artificial Sequence: Synthetic polypeptide
VDGFGDVGALESLRGNADLAYILSMEPCGHCLIINNVNFCRESGLRTRTGSNIDCEKLRRRFSSLHFMVEVKGDLTAKKMVLALLELARQDHGALDCCVVVILSHGCQASHLQFPGAVYGTDGCPVSVEKIVNIFNGTSCPSLGGKPKLFFIQACGGEQKDHGFEVASTSPEDESPGSNPEPDATPFQEGLRTFDQLDAISSLPTPSDIFVSYSTFPGFVSWRDPKSGSWYVETLDDIFEQWAHSEDLQSLLLRVANAVSVKGIYKQMPISAQTLRKKLFFKTSASRA

SEQ ID NO: 130 - DNA, 330 bp, Artificial Sequence; identical to SEQ ID NO: 35
  Description of Artificial Sequence: Synthetic polynucleotide

SEQ ID NO: 131 - protein, 110 aa, Artificial Sequence; identical to SEQ ID NO: 36
  Description of Artificial Sequence: Synthetic polypeptide

SEQ ID NO: 132 - DNA, 18 bp, Artificial Sequence
  Description of Artificial Sequence: Synthetic oligonucleotide
agcggaggaggatccgga

SEQ ID NO: 133 - protein, 6 aa, Artificial Sequence
  Description of Artificial Sequence: Synthetic peptide
SGGGSG

SEQ ID NO: 134 - DNA, 864 bp, Artificial Sequence; identical to SEQ ID NO: 46
  Description of Artificial Sequence: Synthetic polynucleotide

SEQ ID NO: 135 - protein, 288 aa, Artificial Sequence; identical to SEQ ID NO: 45
  Description of Artificial Sequence: Synthetic polypeptide

SEQ ID NO: 136 - DNA, 6 bp, Artificial Sequence
  Description of Artificial Sequence: Synthetic oligonucleotide
ccgcgg

SEQ ID NO: 137 - protein, 2 aa, Artificial Sequence
  Description of Artificial Sequence: Synthetic peptide
PR

SEQ ID NO: 138 - DNA, 54 bp, Artificial Sequence
  Description of Artificial Sequence: Synthetic oligonucleotide
gaaggccgagggagcctgctgacatgtggcgatgtggaggaaaacccaggacca

SEQ ID NO: 139 - protein, 18 aa, Artificial Sequence
  Description of Artificial Sequence: Synthetic peptide
EGRGSLLTCGDVEENPGP

SEQ ID NO: 140 - DNA, 6 bp, Artificial Sequence
  Description of Artificial Sequence: Synthetic oligonucleotide
ccatgg

SEQ ID NO: 141 - protein, 2 aa, Artificial Sequence
  Description of Artificial Sequence: Synthetic peptide
PW

SEQ ID NO: 142 - DNA, 63 bp, Artificial Sequence
  Description of Artificial Sequence: Synthetic oligonucleotide
atggagtttggactttcttggttgtttttggtggcaattctgaagggtgtccagtgtagcagg

SEQ ID NO: 143 - protein, 21 aa, Artificial Sequence
  Description of Artificial Sequence: Synthetic peptide
MEFGLSWLFLVAILKGVQCSR

SEQ ID NO: 144 - DNA, 321 bp, Artificial Sequence
  Description of Artificial Sequence: Synthetic polynucleotide
gacatccagatgacacagactacatcctccctgtctgcctctctgggagacagagtcaccatcagttgcagggcaagtcaggacattagtaaatatttaaattggtatcagcagaaaccagatggaactgttaaactcctgatctaccatacatcaagattacactcaggagtcccatcaaggttcagtggcagtgggtctggaacagattattctctcaccattagcaacctggagcaagaagatattgccacttacttttgccaacagggtaatacgcttccgtacacgttcggaggggggactaagttggaaataaca

SEQ ID NO: 145 - protein, 107 aa, Artificial Sequence
  Description of Artificial Sequence: Synthetic polypeptide
DIQMTQTTSSLSASLGDRVTISCRASQDISKYLNWYQQKPDGTVKLLIYHTSRLHSGVPSRFSGSGSGTDYSLTISNLEQEDIATYFCQQGNTLPYTFGGGTKLEIT

SEQ ID NO: 146 - DNA, 24 bp, Artificial Sequence
  Description of Artificial Sequence: Synthetic oligonucleotide
ggcggaggaagcggaggtgggggc

SEQ ID NO: 147 - protein, 8 aa, Artificial Sequence
  Description of Artificial Sequence: Synthetic peptide
GGGSGGGG

SEQ ID NO: 148 - DNA, 360 bp, Artificial Sequence
  Description of Artificial Sequence: Synthetic polynucleotide
gaggtgaaactgcaggagtcaggacctggcctggtggcgccctcacagagcctgtccgtcacatgcactgtctcaggggtctcattacccgactatggtgtaagctggattcgccagcctccacgaaagggtctggagtggctgggagtaatatggggtagtgaaaccacatactataattcagctctcaaatccagactgaccatcatcaaggacaactccaagagccaagttttcttaaaaatgaacagtctgcaaactgatgacacagccatttactactgtgccaaacattattactacggtggtagctatgctatggactactggggtcaaggaacctcagtcaccgtctcctca

SEQ ID NO: 149 - protein, 120 aa, Artificial Sequence
  Description of Artificial Sequence: Synthetic polypeptide
EVKLQESGPGLVAPSQSLSVTCTVSGVSLPDYGVSWIRQPPRKGLEWLGVIWGSETTYYNSALKSRLTIIKDNSKSQVFLKMNSLQTDDTAIYYCAKHYYYGGSYAMDYWGQGTSVTVSS

SEQ ID NO: 150 - DNA, 6 bp, Artificial Sequence
  Description of Artificial Sequence: Synthetic oligonucleotide
ggatcc

SEQ ID NO: 151 - protein, 2 aa, Artificial Sequence
  Description of Artificial Sequence: Synthetic peptide
GS

SEQ ID NO: 152 - DNA, 48 bp, Artificial Sequence
  Description of Artificial Sequence: Synthetic oligonucleotide
gaacttcctactcaggggactttctcaaacgttagcacaaacgtaagt

SEQ ID NO: 153 - protein, 16 aa, Artificial Sequence
  Description of Artificial Sequence: Synthetic peptide
ELPTQGTFSNVSTNVS

SEQ ID NO: 154 - DNA, 126 bp, Artificial Sequence
  Description of Artificial Sequence: Synthetic polynucleotide
cccgccccaagaccccccacacctgcgccgaccattgcttctcaacccctgagtttgagacccgaggcctgccggccagctgccggcggggccgtgcatacaagaggactcgatttcgcttgcgac

SEQ ID NO: 155 - protein, 42 aa, Artificial Sequence
  Description of Artificial Sequence: Synthetic polypeptide
PAPRPPTPAPTIASQPLSLRPEACRPAAGGAVHTRGLDFACD

SEQ ID NO: 156 - DNA, 111 bp, Artificial Sequence
  Description of Artificial Sequence: Synthetic polynucleotide
atctatatctgggcacctctcgctggcacctgtggagtccttctgctcagcctggttattactctgtactgtaatcaccggaatcgccgccgcgtttgtaagtgtcccagg

SEQ ID NO: 157 - protein, 37 aa, Artificial Sequence
  Description of Artificial Sequence: Synthetic polypeptide
IYIWAPLAGTCGVLLLSLVITLYCNHRNRRRVCKCPR

SEQ ID NO: 158 - DNA, 6 bp, Artificial Sequence
  Description of Artificial Sequence: Synthetic oligonucleotide
gtcgac

SEQ ID NO: 159 - protein, 2 aa, Artificial Sequence
  Description of Artificial Sequence: Synthetic peptide
VD

SEQ ID NO: 160 - DNA, 336 bp, Artificial Sequence
  Description of Artificial Sequence: Synthetic polynucleotide
agagtgaagttcagcaggagcgcagacgcccccgcgtaccagcagggccagaaccagctctataacgagctcaatctaggacgaagagaggagtacgatgttttggacaagagacgtggccgggaccctgagatggggggaaagccgagaaggaagaaccctcaggaaggcctgtacaatgaactgcagaaagataagatggcggaggcctacagtgagattgggatgaaaggcgagcgccggaggggcaaggggcacgatggcctttaccagggtctcagtacagccaccaaggacacctacgacgcccttcacatgcaggccctgccccctcgc

SEQ ID NO: 161 - protein, 112 aa, Artificial Sequence
  Description of Artificial Sequence: Synthetic polypeptide
RVKFSRSADAPAYQQGQNQLYNELNLGRREEYDVLDKRRGRDPEMGGKPRRKNPQEGLYNELQKDKMAEAYSEIGMKGERRRGKGHDGLYQGLSTATKDTYDALHMQALPPR

SEQ ID NO: 162 - DNA, 63 bp, Artificial Sequence; identical to SEQ ID NO: 142
  Description of Artificial Sequence: Synthetic oligonucleotide

SEQ ID NO: 163 - protein, 21 aa, Artificial Sequence
  Description of Artificial Sequence: Synthetic peptide
MEFGLSWLFLVAILKGVQCSR

SEQ ID NO: 164 - DNA, 327 bp, Artificial Sequence
  Description of Artificial Sequence: Synthetic polynucleotide
gacatccaattgacacaatcacacaaatttctctcaacttctgtaggagacagagtgagcataacctgcaaagcatcccaggacgtgtacaatgctgtggcttggtaccaacagaagcctggacaatccccaaaattgctgatttattctgcctctagtaggtacactggggtaccttctcggtttacgggctctgggtccggaccagatttcacgttcacaatcagttccgttcaagctgaagacctcgctgtttatttttgccagcagcacttccgaaccccttttacttttggctcaggcactaagttggaaatcaaggctttg

SEQ ID NO: 165 - protein, 109 aa, Artificial Sequence
  Description of Artificial Sequence: Synthetic polypeptide
DIQLTQSHKFLSTSVGDRVSITCKASQDVYNAVAWYQQKPGQSPKLLIYSASSRYTGVPSRFTGSGSGPDFTFTISSVQAEDLAVYFCQQHFRTPFTFGSGTKLEIKAL

SEQ ID NO: 166 - DNA, 24 bp, Artificial Sequence
  Description of Artificial Sequence: Synthetic oligonucleotide
ggcggaggaagcggaggtgggggc

SEQ ID NO: 167 - protein, 8 aa, Artificial Sequence
  Description of Artificial Sequence: Synthetic peptide
GGGSGGGG

SEQ ID NO: 168 - DNA, 357 bp, Artificial Sequence
  Description of Artificial Sequence: Synthetic polynucleotide
gaagtccaattgcaacagtcaggccccgaattgaaaaagcccggcgaaacagtgaagatatcttgtaaagcctccggttacccttttacgaactatggaatgaactgggtcaaacaagcccctggacagggattgaagtggatgggatggatcaatacatcaacaggcgagtctaccttcgcagatgatttcaaaggtcgctttgacttctcactggagaccagtgcaaataccgcctaccttcagattaacaatcttaaaagcgaggatatggcaacctacttttgcgcaagatgggaagtttatcacgggtacgtgccatactggggacaaggaacgacagtgacagttagtagc

SEQ ID NO: 169 - protein, 119 aa, Artificial Sequence
  Description of Artificial Sequence: Synthetic polypeptide
EVQLQQSGPELKKPGETVKISCKASGYPFTNYGMNWVKQAPGQGLKWMGWINTSTGESTFADDFKGRFDFSLETSANTAYLQINNLKSEDMATYFCARWEVYHGYVPYWGQGTTVTVSS

SEQ ID NO: 170 - DNA, 6 bp, Artificial Sequence
  Description of Artificial Sequence: Synthetic oligonucleotide
ggatcc

SEQ ID NO: 171 - protein, 2 aa, Artificial Sequence
  Description of Artificial Sequence: Synthetic peptide
GS

SEQ ID NO: 172 - DNA, 48 bp, Artificial Sequence; identical to SEQ ID NO: 152
  Description of Artificial Sequence: Synthetic oligonucleotide

SEQ ID NO: 173 - protein, 16 aa, Artificial Sequence
  Description of Artificial Sequence: Synthetic peptide
ELPTQGTFSNVSTNVS

SEQ ID NO: 174 - DNA, 126 bp, Artificial Sequence; identical to SEQ ID NO: 154
  Description of Artificial Sequence: Synthetic polynucleotide

SEQ ID NO: 175 - protein, 42 aa, Artificial Sequence; identical to SEQ ID NO: 155
  Description of Artificial Sequence: Synthetic polypeptide

SEQ ID NO: 176 - DNA, 111 bp, Artificial Sequence; identical to SEQ ID NO: 156
  Description of Artificial Sequence: Synthetic polynucleotide

SEQ ID NO: 177 - protein, 37 aa, Artificial Sequence; identical to SEQ ID NO: 157
  Description of Artificial Sequence: Synthetic polypeptide

SEQ ID NO: 178 - DNA, 6 bp, Artificial Sequence
  Description of Artificial Sequence: Synthetic oligonucleotide
ctcgag

SEQ ID NO: 179 - protein, 2 aa, Artificial Sequence
  Description of Artificial Sequence: Synthetic peptide
LE

SEQ ID NO: 180 - DNA, 336 bp, Artificial Sequence; identical to SEQ ID NO: 160
  Description of Artificial Sequence: Synthetic polynucleotide

SEQ ID NO: 181 - protein, 112 aa, Artificial Sequence; identical to SEQ ID NO: 161
  Description of Artificial Sequence: Synthetic polypeptide

SEQ ID NO: 182 - DNA, 204 bp, Artificial Sequence
  Description of Artificial Sequence: Synthetic polynucleotide
ttctgggtactggttgtagtcggtggcgtacttgcttgttattctcttcttgttaccgtagccttcattatattctgggtccgatcaaagcgctcaagactcctccattccgattatatgaacatgacacctcgccgacctggtcctacacgcaaacattatcaaccctacgcacccccccgagacttcgctgcttatcgatcc

SEQ ID NO: 183 - protein, 68 aa, Artificial Sequence
  Description of Artificial Sequence: Synthetic polypeptide
FWVLVVVGGVLACYSLLVTVAFIIFWVRSKRSRLLHSDYMNMTPRRPGPTRKHYQPYAPPRDFAAYRS

SEQ ID NO: 184 - DNA, 186 bp, Artificial Sequence
  Description of Artificial Sequence: Synthetic polynucleotide
gttgccgccatcctgggcctgggcctggtgctggggctgctgggccccctggccatcctgctggccctgtacctgctccgggaccagaggctgccccccgatgcccacaagccccctgggggaggcagtttccggacccccatccaagaggagcaggccgacgcccactccaccctggccaagatc

SEQ ID NO: 185 - protein, 63 aa, Artificial Sequence
  Description of Artificial Sequence: Synthetic polypeptide
VAAILGLGLVLGLLGPLAILLALYLLRRDQRLPPDAHKPPGGGSFRTPIQEEQADAHSTLAKI

SEQ ID NO: 186 - DNA, 135 bp, Artificial Sequence
  Description of Artificial Sequence: Synthetic polynucleotide
agtgtagttaaaagaggaagaaaaaagttgctgtatatatttaaacaaccatttatgagaccagtgcaaaccacccaagaagaagacggatgttcatgcagattcccagaagaagaagaaggaggatgtgaattg

SEQ ID NO: 187 - protein, 45 aa, Artificial Sequence
  Description of Artificial Sequence: Synthetic polypeptide
SVVKRGRKKLLYIFKQPFMRPVQTTQEEDGCSCRFPEEEEGGCEL

SEQ ID NO: 188 - protein, 288 aa, Artificial Sequence; identical to SEQ ID NO: 89
  Description of Artificial Sequence: Synthetic polypeptide

SEQ ID NO: 189 - DNA, 63 bp, Artificial Sequence; identical to SEQ ID NO: 142
  Description of Artificial Sequence: Synthetic oligonucleotide

SEQ ID NO: 190 - protein, 21 aa, Artificial Sequence
  Description of Artificial Sequence: Synthetic peptide
MEFGLSWLFLVAILKGVQCSR

SEQ ID NO: 191 - DNA, 318 bp, Artificial Sequence
  Description of Artificial Sequence: Synthetic polynucleotide
gacatccagctgacacaaagtcccagtagcctgtcagccagtgtcggcgatagggtgacaattacatgctccgcaagtagtagcgtcagattcatacactggtaccagcagaagcctgggaaggccccaaagaggcttatctacgataccagtaaactcgcctctggagttcctagccggttttctggatctggcagcggaactagctacaccctcacaatctccagtctgcaaccagaggactttgcaacctactactgccagcaatggagcagctcccctttcacctttgggcagggtactaaggtggagatcaag

SEQ ID NO: 192 - protein, 106 aa, Artificial Sequence
  Description of Artificial Sequence: Synthetic polypeptide
DIQLTQSPSSLSASVGDRVTITCSASSSVRFIHWYQQKPGKAPKRLIYDTSKLASGVPSRFSGSGSGTSYTLTISSLQPEDFATYYCQQWSSSPFTFGQGTKVEIK

SEQ ID NO: 193 - DNA, 24 bp, Artificial Sequence
  Description of Artificial Sequence: Synthetic oligonucleotide
ggcggaggaagcggaggtgggggc

SEQ ID NO: 194 - protein, 8 aa, Artificial Sequence
  Description of Artificial Sequence: Synthetic peptide
GGGSGGGG

SEQ ID NO: 195 - DNA, 336 bp, Artificial Sequence
  Description of Artificial Sequence: Synthetic polynucleotide
gaggtgcagcttgtagagagcgggggaggcctcgtacagccagggggctctctgcgcctgtcatgtgcagcttcaggattcaatataaaggactattacattcactgggtacggcaagctcccggtaagggcctggaatggatcggttggatcgaccctgaaaacggagatacagaatttgtgcccaagttccagggaaaggctaccatgtctgccgatacttctaagaatacagcataccttcagatgaattctctccgcgccgaggacacagccgtgtattattgtaaaacgggagggttctggggtcagggtacccttgtgactgtgtcttcc

SEQ ID NO: 196 - protein, 112 aa, Artificial Sequence
  Description of Artificial Sequence: Synthetic polypeptide
EVQLVESGGGLVQPGGSLRLSCAASGFNIKDYYIHWVRQAPGKGLEWIGWIDPENGDTEFVPKFQGKATMSADTSKNTAYLQMNSLRAEDTAVYYCKTGGFWGQGTLVTVSS

SEQ ID NO: 197 - DNA, 12 bp, Artificial Sequence
  Description of Artificial Sequence: Synthetic oligonucleotide
ggggatcccgcc

SEQ ID NO: 198 - protein, 4 aa, Artificial Sequence
  Description of Artificial Sequence: Synthetic peptide
GDPA

SEQ ID NO: 199 - DNA, 36 bp, Artificial Sequence
  Description of Artificial Sequence: Synthetic oligonucleotide
gagcccaaatctcctgacaaaactcacacatgccca

SEQ ID NO: 200 - protein, 12 aa, Artificial Sequence
  Description of Artificial Sequence: Synthetic peptide
EPKSPDKTHTCP

SEQ ID NO: 201 - DNA, 339 bp, Artificial Sequence
  Description of Artificial Sequence: Synthetic polynucleotide
ccgtgcccagcacctgaactcctggggggaccgtcagtcttcctcttccccccaaaacccaaagacaccctcatgatctcccggacccctgaggtcacatgcgtggtggtggacgtgagccacgaagaccctgaggtcaagttcaactggtatgtggacggcgtggaggtgcataatgcaaagacaaagccgcgggaggagcagtacaacagcacgtaccgtgtggtcagcgtcctcaccgtcctgcaccaggactggctgaatggcaaggagtacaagtgcaaggtctccaacaaagccctcccagcccccatcgagaaaaccatctccaaagccaaa

SEQ ID NO: 202 - protein, 113 aa, Artificial Sequence
  Description of Artificial Sequence: Synthetic polypeptide
PCPAPELLGGPSVFLFPPKPKDTLMISRTPEVTCVVVDVSHEDPEVKFNWYVDGVEVHNAKTKPREEQYNSTYRVVSVLTVLHQDWLNGKEYKCKVSNKALPAPIEKTISKAK

SEQ ID NO: 203 - DNA, 321 bp, Artificial Sequence
  Description of Artificial Sequence: Synthetic polynucleotide
gggcagccccgagaaccacaggtgtacaccctgcccccatcccgggatgagctgaccaagaaccaggtcagcctgacctgcctggtcaaaggcttctatcccagcgacatcgccgtggagtgggagagcaatgggcaaccggagaacaactacaagaccacgcctcccgtgctggactccgacggctccttcttcctctacagcaagctcaccgtggacaagagcaggtggcagcaggggaacgtcttctcatgctccgtgatgcatgaggctctgcacaaccactacacgcagaagagcctctccctgtctccgggtaaa

SEQ ID NO: 204 - protein, 107 aa, Artificial Sequence
  Description of Artificial Sequence: Synthetic polypeptide
GQPREPQVYTLPPSRDELTKNQVSLTCLVKGFYPSDIAVEWESNGQPENNYKTTPPVLDSDGSFFLYSKLTVDKSRWQQGNVFSCSVMHEALHNHYTQKSLSLSPGK

SEQ ID NO: 205 - DNA, 12 bp, Artificial Sequence
  Description of Artificial Sequence: Synthetic oligonucleotide
aaagatcccaaa

SEQ ID NO: 206 - protein, 4 aa, Artificial Sequence
  Description of Artificial Sequence: Synthetic peptide
KDPK

SEQ ID NO: 207 - DNA, 72 bp, Artificial Sequence
  Description of Artificial Sequence: Synthetic oligonucleotide
ttttgggtgctggtggtggttggtggagtcctggcttgctatagcttgctagtaacagtggcctttattatt

SEQ ID NO: 208 - protein, 24 aa, Artificial Sequence
  Description of Artificial Sequence: Synthetic peptide
FWVLVVVGGVLACYSLLVTVAFII

SEQ ID NO: 209 - DNA, 6 bp, Artificial Sequence
  Description of Artificial Sequence: Synthetic oligonucleotide
gccggc

SEQ ID NO: 210 - protein, 2 aa, Artificial Sequence
  Description of Artificial Sequence: Synthetic peptide
AG

SEQ ID NO: 211 - DNA, 336 bp, Artificial Sequence; identical to SEQ ID NO: 160
  Description of Artificial Sequence: Synthetic polynucleotide

SEQ ID NO: 212 - protein, 112 aa, Artificial Sequence; identical to SEQ ID NO: 161
  Description of Artificial Sequence: Synthetic polypeptide

SEQ ID NO: 213 - DNA, 513 bp, Artificial Sequence
  Description of Artificial Sequence: Synthetic polynucleotide
gccgctgggggcccaggcgccggatcagctgctcccgtatcttctacttcttctttgccgctggctgctctgaacatgcgcgtgagaagacgcctctccctgttccttaacgttcgcacacaagtcgctgccgattggaccgcccttgccgaagaaatggactttgaatacctggaaattagacaacttgaaacacaggccgaccccactggcagactcctggacgcatggcagggaagacctggtgcaagcgttggacggctcctggatctcctgacaaaactgggacgcgacgacgtactgcttgaactcggacctagcattgaagaagactgccaaaaatatatcctgaaacaacaacaagaagaagccgaaaaacctctccaagtcgcagcagtggactcatcagtaccccgaacagctgagcttgctgggattactacactcgacgacccactcggacatatgcctgaaagattcgacgctttcatttgctattgcccctctgacata

SEQ ID NO: 214 - protein, 171 aa, Artificial Sequence
  Description of Artificial Sequence: Synthetic polypeptide
AAGGPGAGSAAPVSSTSSLPLAALNMRVRRRLSLFLNVRTQVAADWTALAEEMDFEYLEIRQLETQADPTGRLLDAWQGRPGASVGRLLDLLTKLGRDDVLLELGPSIEEDCQKYILKQQQEEAEKPLQVAAVDSSVPRTAELAGITTLDDPLGHMPERFDAFICYCPSDI

SEQ ID NO: 215 - DNA, 189 bp, Artificial Sequence
  Description of Artificial Sequence: Synthetic polynucleotide
aagaaagttgcaaagaaacccacaaataaagccccacaccctaaacaggaaccccaagaaatcaatttcccagatgatctccctggatctaatactgccgccccggtccaagaaaccctgcatggttgccagcctgtcacccaagaggacggaaaagaatcacggattagcgtacaagagagacaatag

SEQ ID NO: 216 - protein, 62 aa, Artificial Sequence
  Description of Artificial Sequence: Synthetic polypeptide
KKVAKKPTNKAPHPKQEPQEINFPDDLPGSNTAAPVQETLHGCQPVTQEDGKESRISVQERQ

SEQ ID NO: 217 - DNA, 63 bp, Artificial Sequence; identical to SEQ ID NO: 142
  Description of Artificial Sequence: Synthetic oligonucleotide

SEQ ID NO: 218 - protein, 21 aa, Artificial Sequence
  Description of Artificial Sequence: Synthetic peptide
MEFGLSWLFLVAILKGVQCSR

SEQ ID NO: 219 - DNA, 321 bp, Artificial Sequence; identical to SEQ ID NO: 144
  Description of Artificial Sequence: Synthetic polynucleotide

SEQ ID NO: 220 - protein, 107 aa, Artificial Sequence; identical to SEQ ID NO: 145
  Description of Artificial Sequence: Synthetic polypeptide

SEQ ID NO: 221 - DNA, 24 bp, Artificial Sequence
  Description of Artificial Sequence: Synthetic oligonucleotide
ggcggaggaagcggaggtgggggc

SEQ ID NO: 222 - protein, 8 aa, Artificial Sequence
  Description of Artificial Sequence: Synthetic peptide
GGGSGGGG

SEQ ID NO: 223 - DNA, 360 bp, Artificial Sequence; identical to SEQ ID NO: 148
  Description of Artificial Sequence: Synthetic polynucleotide

SEQ ID NO: 224 - protein, 120 aa, Artificial Sequence; identical to SEQ ID NO: 149
  Description of Artificial Sequence: Synthetic polypeptide

SEQ ID NO: 225 - DNA, 12 bp, Artificial Sequence
  Description of Artificial Sequence: Synthetic oligonucleotide
ggggatcccgcc

SEQ ID NO: 226 - protein, 4 aa, Artificial Sequence
  Description of Artificial Sequence: Synthetic peptide
GDPA

SEQ ID NO: 227 - DNA, 36 bp, Artificial Sequence; identical to SEQ ID NO: 199
  Description of Artificial Sequence: Synthetic oligonucleotide

SEQ ID NO: 228 - protein, 12 aa, Artificial Sequence
  Description of Artificial Sequence: Synthetic peptide
EPKSPDKTHTCP

SEQ ID NO: 229 - DNA, 339 bp, Artificial Sequence; identical to SEQ ID NO: 201
  Description of Artificial Sequence: Synthetic polynucleotide

SEQ ID NO: 230 - protein, 113 aa, Artificial Sequence; identical to SEQ ID NO: 202
  Description of Artificial Sequence: Synthetic polypeptide

SEQ ID NO: 231 - DNA, 321 bp, Artificial Sequence; identical to SEQ ID NO: 203
  Description of Artificial Sequence: Synthetic polynucleotide

SEQ ID NO: 232 - protein, 107 aa, Artificial Sequence; identical to SEQ ID NO: 204
  Description of Artificial Sequence: Synthetic polypeptide

SEQ ID NO: 233 - DNA, 12 bp, Artificial Sequence
  Description of Artificial Sequence: Synthetic oligonucleotide
aaagatcccaaa

SEQ ID NO: 234 - protein, 4 aa, Artificial Sequence
  Description of Artificial Sequence: Synthetic peptide
KDPK

SEQ ID NO: 235 - DNA, 72 bp, Artificial Sequence; identical to SEQ ID NO: 207
  Description of Artificial Sequence: Synthetic oligonucleotide

SEQ ID NO: 236 - protein, 24 aa, Artificial Sequence
  Description of Artificial Sequence: Synthetic peptide
FWVLVVVGGVLACYSLLVTVAFII

SEQ ID NO: 237 - DNA, 6 bp, Artificial Sequence
  Description of Artificial Sequence: Synthetic oligonucleotide
ctcgag

SEQ ID NO: 238 - protein, 2 aa, Artificial Sequence
  Description of Artificial Sequence: Synthetic peptide
LE

SEQ ID NO: 239 - DNA, 516 bp, Artificial Sequence
  Description of Artificial Sequence: Synthetic polynucleotide
atggccgctgggggcccaggcgccggatcagctgctcccgtatcttctacttcttctttgccgctggctgctctgaacatgcgcgtgagaagacgcctctccctgttccttaacgttcgcacacaagtcgctgccgattggaccgcccttgccgaagaaatggactttgaatacctggaaattagacaacttgaaacacaggccgaccccactggcagactcctggacgcatggcagggaagacctggtgcaagcgttggacggctcctggatctcctgacaaaactgggacgcgacgacgtactgcttgaactcggacctagcattgaagaagactgccaaaaatatatcctgaaacaacaacaagaagaagccgaaaaacctctccaagtcgcagcagtggactcatcagtaccccgaacagctgagcttgctgggattactacactcgacgacccactcggacatatgcctgaaagattcgacgctttcatttgctattgcccctctgacata

SEQ ID NO: 240 - protein, 172 aa, Artificial Sequence
  Description of Artificial Sequence: Synthetic polypeptide
MAAGGPGAGSAAPVSSTSSLPLAALNMRVRRRLSLFLNVRTQVAADWTALAEEMDFEYLEIRQLETQADPTGRLLDAWQGRPGASVGRLLDLLTKLGRDDVLLELGPSIEEDCQKYILKQQQEEAEKPLQVAAVDSSVPRTAELAGITTLDDPLGHMPERFDAFICYCPSDI

SEQ ID NO: 241 - DNA, 186 bp, Artificial Sequence
  Description of Artificial Sequence: Synthetic polynucleotide
aagaaagttgcaaagaaacccacaaataaagccccacaccctaaacaggaaccccaagaaatcaatttcccagatgatctccctggatctaatactgccgccccggtccaagaaaccctgcatggttgccagcctgtcacccaagaggacggaaaagaatcacggattagcgtacaagagagacaa

SEQ ID NO: 242 - protein, 62 aa, Artificial Sequence; identical to SEQ ID NO: 216
  Description of Artificial Sequence: Synthetic polypeptide

SEQ ID NO: 243 - DNA, 15 bp, Artificial Sequence
  Description of Artificial Sequence: Synthetic oligonucleotide
gcggccgcagtcgag

SEQ ID NO: 244 - protein, 5 aa, Artificial Sequence
  Description of Artificial Sequence: Synthetic peptide
AAAVE

SEQ ID NO: 245 - DNA, 339 bp, Artificial Sequence
  Description of Artificial Sequence: Synthetic polynucleotide
agagtgaagttcagcaggagcgcagacgcccccgcgtaccagcagggccagaaccagctctataacgagctcaatctaggacgaagagaggagtacgatgttttggacaagagacgtggccgggaccctgagatggggggaaagccgagaaggaagaaccctcaggaaggcctgtacaatgaactgcagaaagataagatggcggaggcctacagtgagattgggatgaaaggcgagcgccggaggggcaaggggcacgatggcctttaccagggtctcagtacagccaccaaggacacctacgacgcccttcacatgcaggccctgccccctcgctaa

SEQ ID NO: 246 - protein, 112 aa, Artificial Sequence; identical to SEQ ID NO: 161
  Description of Artificial Sequence: Synthetic polypeptide

SEQ ID NO: 247 - DNA, 42 bp, Artificial Sequence
  Description of Artificial Sequence: Synthetic oligonucleotide
atggggagtagcaagagcaagcctaaggaccccagccagcgc

SEQ ID NO: 248 - protein, 14 aa, Artificial Sequence
  Description of Artificial Sequence: Synthetic peptide
MGSSKSKPKDPSQR

SEQ ID NO: 249 - DNA, 6 bp, Artificial Sequence
  Description of Artificial Sequence: Synthetic oligonucleotide
ctcgac

SEQ ID NO: 250 - protein, 2 aa, Artificial Sequence
  Description of Artificial Sequence: Synthetic peptide
LD

SEQ ID NO: 251 - DNA, 516 bp, Artificial Sequence
  Description of Artificial Sequence: Synthetic polynucleotide
atggctgcaggaggtcccggcgcggggtctgcggccccggtctcctccacatcctcccttcccctggctgctctcaacatgcgagtgcggcgccgcctgtctctgttcttgaacgtgcggacacaggtggcggccgactggaccgcgctggcggaggagatggactttgagtacttggagatccggcaactggagacacaagcggaccccactggcaggctgctggacgcctggcagggacgccctggcgcctctgtaggccgactgctcgatctgcttaccaagctgggccgcgacgacgtgctgctggagctgggacccagcattgaggaggattgccaaaagtatatcttgaagcagcagcaggaggaggctgagaagcctttacaggtggccgctgtagacagcagtgtcccacggacagcagagctggcgggcatcaccacacttgatgaccccctggggcatatgcctgagcgtttcgatgccttcatctgctattgccccagcgacatc

SEQ ID NO: 252 - protein, 172 aa, Artificial Sequence; identical to SEQ ID NO: 240
  Description of Artificial Sequence: Synthetic polypeptide

SEQ ID NO: 253 - DNA, 6 bp, Artificial Sequence
  Description of Artificial Sequence: Synthetic oligonucleotide
gtcgag

SEQ ID NO: 254 - protein, 2 aa, Artificial Sequence
  Description of Artificial Sequence: Synthetic peptide
VE

SEQ ID NO: 255 - DNA, 186 bp, Artificial Sequence
  Description of Artificial Sequence: Synthetic polynucleotide
aaaaaggtggccaagaagccaaccaataaggccccccaccccaagcaggagccccaggagatcaattttcccgacgatcttcctggctccaacactgctgctccagtgcaggagactttacatggatgccaaccggtcacccaggaggatggcaaagagagtcgcatctcagtgcaggagagacag

SEQ ID NO: 256 - protein, 62 aa, Artificial Sequence; identical to SEQ ID NO: 216
  Description of Artificial Sequence: Synthetic polypeptide

SEQ ID NO: 257 - DNA, 6 bp, Artificial Sequence
  Description of Artificial Sequence: Synthetic oligonucleotide
ccgcgg

SEQ ID NO: 258 - protein, 2 aa, Artificial Sequence
  Description of Artificial Sequence: Synthetic peptide
PR

SEQ ID NO: 259 - DNA, 54 bp, Artificial Sequence; identical to SEQ ID NO: 138
  Description of Artificial Sequence: Synthetic oligonucleotide

SEQ ID NO: 260 - protein, 18 aa, Artificial Sequence
  Description of Artificial Sequence: Synthetic peptide
EGRGSLLTCGDVEENPGP

SEQ ID NO: 261 - DNA, 63 bp, Artificial Sequence; identical to SEQ ID NO: 142
  Description of Artificial Sequence: Synthetic oligonucleotide

SEQ ID NO: 262 - protein, 21 aa, Artificial Sequence
  Description of Artificial Sequence: Synthetic peptide
MEFGLSWLFLVAILKGVQCSR

SEQ ID NO: 263 - DNA, 321 bp, Artificial Sequence; identical to SEQ ID NO: 144
  Description of Artificial Sequence: Synthetic polynucleotide

SEQ ID NO: 264 - protein, 107 aa, Artificial Sequence; identical to SEQ ID NO: 145
  Description of Artificial Sequence: Synthetic polypeptide

SEQ ID NO: 265 - DNA, 24 bp, Artificial Sequence
  Description of Artificial Sequence: Synthetic oligonucleotide
ggcggaggaagcggaggtgggggc

SEQ ID NO: 266 - protein, 8 aa, Artificial Sequence
  Description of Artificial Sequence: Synthetic peptide
GGGSGGGG

SEQ ID NO: 267 - DNA, 360 bp, Artificial Sequence; identical to SEQ ID NO: 148
  Description of Artificial Sequence: Synthetic polynucleotide

SEQ ID NO: 268 - protein, 120 aa, Artificial Sequence; identical to SEQ ID NO: 149
  Description of Artificial Sequence: Synthetic polypeptide

SEQ ID NO: 269 - DNA, 6 bp, Artificial Sequence
  Description of Artificial Sequence: Synthetic oligonucleotide
ggatcc

SEQ ID NO: 270 - protein, 2 aa, Artificial Sequence
  Description of Artificial Sequence: Synthetic peptide
GS

SEQ ID NO: 271 - DNA, 48 bp, Artificial Sequence; identical to SEQ ID NO: 152
  Description of Artificial Sequence: Synthetic oligonucleotide

SEQ ID NO: 272 - protein, 16 aa, Artificial Sequence
  Description of Artificial Sequence: Synthetic peptide
ELPTQGTFSNVSTNVS

SEQ ID NO: 273 - DNA, 126 bp, Artificial Sequence; identical to SEQ ID NO: 154
  Description of Artificial Sequence: Synthetic polynucleotide

SEQ ID NO: 274 - protein, 42 aa, Artificial Sequence; identical to SEQ ID NO: 155
  Description of Artificial Sequence: Synthetic polypeptide

SEQ ID NO: 275 - DNA, 111 bp, Artificial Sequence; identical to SEQ ID NO: 156
  Description of Artificial Sequence: Synthetic polynucleotide

SEQ ID NO: 276 - protein, 37 aa, Artificial Sequence; identical to SEQ ID NO: 157
  Description of Artificial Sequence: Synthetic polypeptide

SEQ ID NO: 277 - DNA, 6 bp, Artificial Sequence
  Description of Artificial Sequence: Synthetic oligonucleotide
gtcgac

SEQ ID NO: 278 - protein, 2 aa, Artificial Sequence
  Description of Artificial Sequence: Synthetic peptide
VD

SEQ ID NO: 279 - DNA, 336 bp, Artificial Sequence; identical to SEQ ID NO: 160
  Description of Artificial Sequence: Synthetic polynucleotide

SEQ ID NO: 280 - protein, 112 aa, Artificial Sequence; identical to SEQ ID NO: 161
  Description of Artificial Sequence: Synthetic polypeptide

SEQ ID NO: 281 - DNA, 888 bp, Artificial Sequence
  Description of Artificial Sequence: Synthetic polynucleotide
atggctgcaggaggtcccggcgcggggtctgcggccccggtctcctccacatcctcccttcccctggctgctctcaacatgcgagtgcggcgccgcctgtctctgttcttgaacgtgcggacacaggtggcggccgactggaccgcgctggcggaggagatggactttgagtacttggagatccggcaactggagacacaagcggaccccactggcaggctgctggacgcctggcagggacgccctggcgcctctgtaggccgactgctcgagctgcttaccaagctgggccgcgacgacgtgctgctggagctgggacccagcattgaggaggattgccaaaagtatatcttgaagcagcagcaggaggaggctgagaagcctttacaggtggccgctgtagacagcagtgtcccacggacagcagagctggcgggcatcaccacacttgatgaccccctggggcatatgcctgagcgtttcgatgccttcatctgctattgccccagcgacatccagtttgtgcaggagatgatccggcaactggaacagacaaactatcgactgaagttgtgtgtgtctgaccgcgatgtcctgcctggcacctgtgtctggtctattgctagtgagctcatcgaaaagaggtgccgccggatggtggtggttgtctctgatgattacctgcagagcaaggaatgtgacttccagaccaaatttgcactcagcctctctccaggtgcccatcagaagcgactgatccccatcaagtacaaggcaatgaagaaagagttccccagcatcctgaggttcatcactgtctgcgactacaccaacccctgcaccaaatcttggttctggactcgccttgccaaggccttgtccctgccc

SEQ ID NO: 282 - protein, 296 aa, Artificial Sequence
  Description of Artificial Sequence: Synthetic polypeptide
MAAGGPGAGSAAPVSSTSSLPLAALNMRVRRRLSLFLNVRTQVAADWTALAEEMDFEYLEIRQLETQADPTGRLLDAWQGRPGASVGRLLELLTKLGRDDVLLELGPSIEEDCQKYILKQQQEEAEKPLQVAAVDSSVPRTAELAGITTLDDPLGHMPERFDAFICYCPSDIQFVQEMIRQLEQTNYRLKLCVSDRDVLPGTCVWSIASELIEKRCRRMVVVVSDDYLQSKECDFQTKFALSLSPGAHQKRLIPIKYKAMKKEFPSILRFITVCDYTNPCTKSWFWTRLAKALSLP

SEQ ID NO: 283 - protein, 16 aa, Homo sapiens
MGSNKSKPKDASQRRR

SEQ ID NO: 284 - protein, 5 aa, Artificial Sequence
  Description of Artificial Sequence: Synthetic peptide
  MOD_RES (4)..(4): Any amino acid
MGCXC

SEQ ID NO: 285 - protein, 6 aa, Artificial Sequence
  Description of Artificial Sequence: Synthetic peptide
GSGGGS

SEQ ID NO: 286 - protein, 5 aa, Artificial Sequence
  Description of Artificial Sequence: Synthetic peptide
SGGGS

SEQ ID NO: 287 - protein, 8 aa, Artificial Sequence
  Description of Artificial Sequence: Synthetic peptide
RAKFKQLL

SEQ ID NO: 288 - protein, 9 aa, Artificial Sequence
  Description of Artificial Sequence: Synthetic peptide
NLVPMVATV

SEQ ID NO: 289 - protein, 6 aa, Artificial Sequence
  Description of Artificial Sequence: Synthetic peptide
SGGGSG

SEQ ID NO: 290 - protein, 7 aa, Homo sapiens
TDPTRRF

SEQ ID NO: 291 - DNA, 18 bp, Artificial Sequence
  Description of Artificial Sequence: Synthetic primer
tccgccctgagcaaagac

SEQ ID NO: 292 - DNA, 20 bp, Artificial Sequence
  Description of Artificial Sequence: Synthetic primer
acgaactccagcaggaccat

SEQ ID NO: 293 - DNA, 15 bp, Artificial Sequence
  Description of Artificial Sequence: Synthetic probe
acgagaagcgcgatc

SEQ ID NO: 294 - DNA, 19 bp, Artificial Sequence
  Description of Artificial Sequence: Synthetic primer
ctggaatctggcggtggat

SEQ ID NO: 295 - DNA, 23 bp, Artificial Sequence
  Description of Artificial Sequence: Synthetic primer
caaactctcaagagcaccgacat

SEQ ID NO: 296 - DNA, 15 bp, Artificial Sequence
  Description of Artificial Sequence: Synthetic probe
cggagtcgacggatt

SEQ ID NO: 297 - protein, 5 aa, Homo sapiens
GCFNF

SEQ ID NO: 298 - protein, 5 aa, Artificial Sequence
  Description of Artificial Sequence: Synthetic peptide
CIVSM

SEQ ID NO: 299 - protein, 4 aa, Homo sapiens
ATPF

SEQ ID NO: 300 - protein, 288 aa, Artificial Sequence; identical to SEQ ID NO: 45
  Description of Artificial Sequence: Synthetic polypeptide

SEQ ID NO: 301 - protein, 5 aa, Artificial Sequence
  Description of Artificial Sequence: Synthetic peptide
DAISS

SEQ ID NO: 302 - protein, 5 aa, Artificial Sequence
  Description of Artificial Sequence: Synthetic peptide
AAAAA

SEQ ID NO: 303 - protein, 5 aa, Artificial Sequence
  Description of Artificial Sequence: Synthetic peptide
ISAQT

SEQ ID NO: 304 - protein, 4 aa, Artificial Sequence
  Description of Artificial Sequence: Synthetic peptide
AVPI

SEQ ID NO: 305 - protein, 5 aa, Artificial Sequence
  Description of Artificial Sequence: Synthetic peptide
YCSTL

SEQ ID NO: 306 - protein, 5 aa, Artificial Sequence
  Description of Artificial Sequence: Synthetic peptide
CIVSM

SEQ ID NO: 307 - protein, 5 aa, Artificial Sequence
  Description of Artificial Sequence: Synthetic peptide
QPTFT

SEQ ID NO: 308 - DNA, 54 bp, Artificial Sequence; identical to SEQ ID NO: 138
  Description of Artificial Sequence: Synthetic oligonucleotide

SEQ ID NO: 309 - DNA, 1002 bp, Artificial Sequence
  Description of Artificial Sequence: Synthetic polynucleotide
atgccaccacctcgcctgctgttctttctgctgttcctgacacctatggaggtgcgacctgaggaaccactggtcgtgaaggtcgaggaaggcgacaatgccgtgctgcagtgcctgaaaggcacttctgatgggccaactcagcagctgacctggtccagggagtctcccctgaagccttttctgaaactgagcctgggactgccaggactgggaatccacatgcgccctctggctatctggctgttcatcttcaacgtgagccagcagatgggaggattctacctgtgccagccaggaccaccatccgagaaggcctggcagcctggatggaccgtcaacgtggaggggtctggagaactgtttaggtggaatgtgagtgacctgggaggactgggatgtgggctgaagaaccgctcctctgaaggcccaagttcaccctcagggaagctgatgagcccaaaactgtacgtgtgggccaaagatcggcccgagatctgggagggagaacctccatgcctgccacctagagacagcctgaatcagagtctgtcacaggatctgacaatggcccccgggtccactctgtggctgtcttgtggagtcccacccgacagcgtgtccagaggccctctgtcctggacccacgtgcatcctaaggggccaaaaagtctgctgtcactggaactgaaggacgatcggcctgccagagacatgtgggtcatggagactggactgctgctgccacgagcaaccgcacaggatgctggaaaatactattgccaccggggcaatctgacaatgtccttccatctggagatcactgcaaggcccgtgctgtggcactggctgctgcgaaccggaggatggaaggtcagtgctgtgacactggcatatctgatcttttgcctgtgctccctggtgggcattctgcatctgcagagagccctggtgctgcggagaaagagaaagagaatgactgacccaacaagaaggttttga

SEQ ID NO: 310 - protein, 333 aa, Artificial Sequence; identical to SEQ ID NO: 15
  Description of Artificial Sequence: Synthetic polypeptide

SEQ ID NO: 311 - DNA, 329 bp, Artificial Sequence
  Description of Artificial Sequence: Synthetic polynucleotide
atgctcgagggagtgcaggtggagactatctccccaggagacgggcgcaccttccccaagcgcggccagacctgcgtggtgcactacaccgggatgcttgaagatggaaagaaagttgattcctcccgggacagaaacaagccctttaagtttatgctaggcaagcaggaggtgatccgaggctgggaagaaggggttgcccagatgagtgtgggtcagagagccaaactgactatatctccagattatgcctatggtgccactgggcacccaggcatcatcccaccacatgccactctcgtcttcgatgtggagcttctaaaactgga

SEQ ID NO: 312 - DNA, 18 bp, Artificial Sequence
  Description of Artificial Sequence: Synthetic oligonucleotide
tctggcggtggatccgga

SEQ ID NO: 313 - DNA, 54 bp, Artificial Sequence
  Description of Artificial Sequence: Synthetic oligonucleotide
gagggcaggggaagtcttctaacatgcggggacgtggaggaaaatcccgggccc

SEQ ID NO: 314 - protein, 110 aa, Artificial Sequence; identical to SEQ ID NO: 36
  Description of Artificial Sequence: Synthetic polypeptide

SEQ ID NO: 315 - protein, 6 aa, Artificial Sequence
  Description of Artificial Sequence: Synthetic peptide
SGGGSG

SEQ ID NO: 316 - protein, 18 aa, Artificial Sequence
  Description of Artificial Sequence: Synthetic peptide
EGRGSLLTCGDVEENPGP

SEQ ID NO: 317 - DNA, 321 bp, Artificial Sequence
  Description of Artificial Sequence: Synthetic polynucleotide
ggagtgcaggtggagactattagccccggagatggcagaacattccccaaaagaggacagacttgcgtcgtgcattatactggaatgctggaagacggcaagaaggtggacagcagccgggaccgaaacaagcccttcaagttcatgctggggaagcaggaagtgatccggggctgggaggaaggagtcgcacagatgtcagtgggacagagggccaaactgactattagcccagactacgcttatggagcaaccggccaccccgggatcattccccctcatgctacactggtcttcgatgtggagctgctgaagctggaa

SEQ ID NO: 318 - DNA, 18 bp, Artificial Sequence
  Description of Artificial Sequence: Synthetic oligonucleotide
agcggaggaggatccgga

SEQ ID NO: 319 - DNA, 60 bp, Artificial Sequence
  Description of Artificial Sequence: Synthetic oligonucleotide
ccgcgggaaggccgagggagcctgctgacatgtggcgatgtggaggaaaacccaggacca

SEQ ID NO: 320 - protein, 18 aa, Artificial Sequence
  Description of Artificial Sequence: Synthetic peptide
EGRGSLLTCGDVEENPGP

SEQ ID NO: 321 - DNA, 330 bp, Artificial Sequence; identical to SEQ ID NO: 35
  Description of Artificial Sequence: Synthetic polynucleotide

SEQ ID NO: 322 - protein, 110 aa, Artificial Sequence; identical to SEQ ID NO: 36
  Description of Artificial Sequence: Synthetic polypeptide

SEQ ID NO: 323 - DNA, 18 bp, Artificial Sequence
  Description of Artificial Sequence: Synthetic oligonucleotide
agcggaggaggatccgga

SEQ ID NO: 324 - protein, 6 aa, Artificial Sequence
  Description of Artificial Sequence: Synthetic peptide
SGGGSG

SEQ ID NO: 325 - DNA, 864 bp, Artificial Sequence; identical to SEQ ID NO: 46
  Description of Artificial Sequence: Synthetic polynucleotide

SEQ ID NO: 326 - protein, 288 aa, Artificial Sequence; identical to SEQ ID NO: 45
  Description of Artificial Sequence: Synthetic polypeptide

SEQ ID NO: 327 - DNA, 6 bp, Artificial Sequence
  Description of Artificial Sequence: Synthetic oligonucleotide
ccgcgg

SEQ ID NO: 328 - protein, 2 aa, Artificial Sequence
  Description of Artificial Sequence: Synthetic peptide
PR

SEQ ID NO: 329 - DNA, 54 bp, Artificial Sequence; identical to SEQ ID NO: 138
  Description of Artificial Sequence: Synthetic oligonucleotide

SEQ ID NO: 330 - protein, 18 aa, Artificial Sequence
  Description of Artificial Sequence: Synthetic peptide
EGRGSLLTCGDVEENPGP

SEQ ID NO: 331 - DNA, 6 bp, Artificial Sequence
  Description of Artificial Sequence: Synthetic oligonucleotide
ccatgg

SEQ ID NO: 332 - protein, 2 aa, Artificial Sequence
  Description of Artificial Sequence: Synthetic peptide
PW

SEQ ID NO: 333 - DNA, 63 bp, Artificial Sequence; identical to SEQ ID NO: 142
  Description of Artificial Sequence: Synthetic oligonucleotide

SEQ ID NO: 334 - protein, 21 aa, Artificial Sequence
  Description of Artificial Sequence: Synthetic peptide
MEFGLSWLFLVAILKGVQCSR

SEQ ID NO: 335 - DNA, 321 bp, Artificial Sequence; identical to SEQ ID NO: 144
  Description of Artificial Sequence: Synthetic polynucleotide

SEQ ID NO: 336 - protein, 107 aa, Artificial Sequence; identical to SEQ ID NO: 145
  Description of Artificial Sequence: Synthetic polypeptide

SEQ ID NO: 337 - DNA, 24 bp, Artificial Sequence
  Description of Artificial Sequence: Synthetic oligonucleotide
ggcggaggaagcggaggtgggggc

SEQ ID NO: 338 - protein, 8 aa, Artificial Sequence
  Description of Artificial Sequence: Synthetic peptide
GGGSGGGG

SEQ ID NO: 339 - DNA, 360 bp, Artificial Sequence; identical to SEQ ID NO: 148
  Description of Artificial Sequence: Synthetic polynucleotide

SEQ ID NO: 340 - protein, 120 aa, Artificial Sequence; identical to SEQ ID NO: 149
  Description of Artificial Sequence: Synthetic polypeptide

SEQ ID NO: 341 - DNA, 6 bp, Artificial Sequence
  Description of Artificial Sequence: Synthetic oligonucleotide
ggatcc

SEQ ID NO: 342 - protein, 2 aa, Artificial Sequence
  Description of Artificial Sequence: Synthetic peptide
GS

SEQ ID NO: 343 - DNA, 48 bp, Artificial Sequence; identical to SEQ ID NO: 152
  Description of Artificial Sequence: Synthetic oligonucleotide

SEQ ID NO: 344 - protein, 16 aa, Artificial Sequence
  Description of Artificial Sequence: Synthetic peptide
ELPTQGTFSNVSTNVS

SEQ ID NO: 345 - DNA, 126 bp, Artificial Sequence; identical to SEQ ID NO: 154
  Description of Artificial Sequence: Synthetic polynucleotide

SEQ ID NO: 346 - protein, 42 aa, Artificial Sequence; identical to SEQ ID NO: 155
  Description of Artificial Sequence: Synthetic polypeptide

SEQ ID NO: 347 - DNA, 111 bp, Artificial Sequence; identical to SEQ ID NO: 156
  Description of Artificial Sequence: Synthetic polynucleotide

SEQ ID NO: 348 - protein, 37 aa, Artificial Sequence; identical to SEQ ID NO: 157
  Description of Artificial Sequence: Synthetic polypeptide

SEQ ID NO: 349 - DNA, 6 bp, Artificial Sequence
  Description of Artificial Sequence: Synthetic oligonucleotide
gtcgac

SEQ ID NO: 350 - protein, 2 aa, Artificial Sequence
  Description of Artificial Sequence: Synthetic peptide
VD

SEQ ID NO: 351 - DNA, 516 bp, Artificial Sequence; identical to SEQ ID NO: 239
  Description of Artificial Sequence: Synthetic polynucleotide

SEQ ID NO: 352 - protein, 172 aa, Artificial Sequence; identical to SEQ ID NO: 240
  Description of Artificial Sequence: Synthetic polypeptide

SEQ ID NO: 353 - DNA, 186 bp, Artificial Sequence; identical to SEQ ID NO: 241
  Description of Artificial Sequence: Synthetic polynucleotide

SEQ ID NO: 354 - protein, 62 aa, Artificial Sequence; identical to SEQ ID NO: 216
  Description of Artificial Sequence: Synthetic polypeptide

SEQ ID NO: 355 - DNA, 336 bp, Artificial Sequence; identical to SEQ ID NO: 160
  Description of Artificial Sequence: Synthetic polynucleotide

SEQ ID NO: 356 - protein, 112 aa, Artificial Sequence; identical to SEQ ID NO: 161
  Description of Artificial Sequence: Synthetic polypeptide

SEQ ID NO: 357 - DNA, 63 bp, Artificial Sequence; identical to SEQ ID NO: 142
  Description of Artificial Sequence: Synthetic oligonucleotide

SEQ ID NO: 358 - protein, 21 aa, Artificial Sequence
  Description of Artificial Sequence: Synthetic peptide
MEFGLSWLFLVAILKGVQCSR

SEQ ID NO: 359 - DNA, 327 bp, Artificial Sequence; identical to SEQ ID NO: 164
  Description of Artificial Sequence: Synthetic polynucleotide

SEQ ID NO: 360 - protein, 109 aa, Artificial Sequence; identical to SEQ ID NO: 165
  Description of Artificial Sequence: Synthetic polypeptide

SEQ ID NO: 361 - DNA, 24 bp, Artificial Sequence
  Description of Artificial Sequence: Synthetic oligonucleotide
ggcggaggaagcggaggtgggggc

SEQ ID NO: 362 - protein, 8 aa, Artificial Sequence
  Description of Artificial Sequence: Synthetic peptide
GGGSGGGG

SEQ ID NO: 363 - DNA, 357 bp, Artificial Sequence; identical to SEQ ID NO: 168
  Description of Artificial Sequence: Synthetic polynucleotide

SEQ ID NO: 364 - protein, 119 aa, Artificial Sequence; identical to SEQ ID NO: 169
  Description of Artificial Sequence: Synthetic polypeptide

SEQ ID NO: 365 - DNA, 6 bp, Artificial Sequence
  Description of Artificial Sequence: Synthetic oligonucleotide
ggatcc

SEQ ID NO: 366 - protein, 2 aa, Artificial Sequence
  Description of Artificial Sequence: Synthetic peptide
GS

SEQ ID NO: 367 - DNA, 48 bp, Artificial Sequence; identical to SEQ ID NO: 152
  Description of Artificial Sequence: Synthetic oligonucleotide

SEQ ID NO: 368 - protein, 16 aa, Artificial Sequence
  Description of Artificial Sequence: Synthetic peptide
ELPTQGTFSNVSTNVS

SEQ ID NO: 369 - DNA, 126 bp, Artificial Sequence; identical to SEQ ID NO: 154
  Description of Artificial Sequence: Synthetic polynucleotide

SEQ ID NO: 370 - protein, 42 aa, Artificial Sequence; identical to SEQ ID NO: 155
  Description of Artificial Sequence: Synthetic polypeptide

SEQ ID NO: 371 - DNA, 111 bp, Artificial Sequence; identical to SEQ ID NO: 156
  Description of Artificial Sequence: Synthetic polynucleotide

SEQ ID NO: 372 - protein, 37 aa, Artificial Sequence; identical to SEQ ID NO: 157
  Description of Artificial Sequence: Synthetic polypeptide

SEQ ID NO: 373 - DNA, 6 bp, Artificial Sequence
  Description of Artificial Sequence: Synthetic oligonucleotide
ctcgag

SEQ ID NO: 374 - protein, 2 aa, Artificial Sequence
  Description of Artificial Sequence: Synthetic peptide
LE

SEQ ID NO: 375 - DNA, 516 bp, Artificial Sequence; identical to SEQ ID NO: 239
  Description of Artificial Sequence: Synthetic polynucleotide

SEQ ID NO: 376 - protein, 172 aa, Artificial Sequence; identical to SEQ ID NO: 240
  Description of Artificial Sequence: Synthetic polypeptide

SEQ ID NO: 377 - DNA, 186 bp, Artificial Sequence; identical to SEQ ID NO: 241
  Description of Artificial Sequence: Synthetic polynucleotide

SEQ ID NO: 378 - protein, 62 aa, Artificial Sequence; identical to SEQ ID NO: 216
  Description of Artificial Sequence: Synthetic polypeptide

SEQ ID NO: 379 - DNA, 15 bp, Artificial Sequence
  Description of Artificial Sequence: Synthetic oligonucleotide
gcggccgcagtcgag

SEQ ID NO: 380 - protein, 5 aa, Artificial Sequence
  Description of Artificial Sequence: Synthetic peptide
AAAVE

SEQ ID NO: 381 - DNA, 336 bp, Artificial Sequence; identical to SEQ ID NO: 160
  Description of Artificial Sequence: Synthetic polynucleotide

SEQ ID NO: 382 - protein, 112 aa, Artificial Sequence; identical to SEQ ID NO: 161
  Description of Artificial Sequence: Synthetic polypeptide

SEQ ID NO: 383 - protein, 282 aa, Artificial Sequence; identical to SEQ ID NO: 22
  Description of Artificial Sequence: Synthetic polypeptide

SEQ ID NO: 384 - DNA, 846 bp, Artificial Sequence; identical to SEQ ID NO: 23
  Description of Artificial Sequence: Synthetic polynucleotide

SEQ ID NO: 385 - protein, 282 aa, Artificial Sequence; identical to SEQ ID NO: 24
  Description of Artificial Sequence: Synthetic polypeptide

SEQ ID NO: 386 - DNA, 846 bp, Artificial Sequence; identical to SEQ ID NO: 25
  Description of Artificial Sequence: Synthetic polynucleotide

SEQ ID NO: 387 - protein, 282 aa, Artificial Sequence; identical to SEQ ID NO: 26
  Description of Artificial Sequence: Synthetic polypeptide

SEQ ID NO: 388 - DNA, 846 bp, Artificial Sequence; identical to SEQ ID NO: 27
  Description of Artificial Sequence: Synthetic polynucleotide

SEQ ID NO: 389 - protein, 282 aa, Artificial Sequence; identical to SEQ ID NO: 28
  Description of Artificial Sequence: Synthetic polypeptide

SEQ ID NO: 390 - DNA, 864 bp, Artificial Sequence; identical to SEQ ID NO: 39
  Description of Artificial Sequence: Synthetic polynucleotide

SEQ ID NO: 391 - protein, 288 aa, Artificial Sequence; identical to SEQ ID NO: 40
  Description of Artificial Sequence: Synthetic polypeptide

SEQ ID NO: 392 - DNA, 864 bp, Artificial Sequence; identical to SEQ ID NO: 86
  Description of Artificial Sequence: Synthetic polynucleotide

SEQ ID NO: 393 - DNA, 324 bp, Artificial Sequence
  Description of Artificial Sequence: Synthetic polynucleotide
atgggagtgcaggtggagactattagccccggagatggcagaacattccccaaaagaggacagacttgcgtcgtgcattatactggaatgctggaagacggcaagaaggtggacagcagccgggaccgaaacaagcccttcaagttcatgctggggaagcaggaagtgatccggggctgggaggaaggagtcgcacagatgtcagtgggacagagggccaaactgactattagcccagactacgcttatggagcaaccggccaccccgggatcattccccctcatgctacactggtcttcgatgtggagctgctgaagctggaa

SEQ ID NO: 394 - protein, 108 aa, Artificial Sequence
  Description of Artificial Sequence: Synthetic polypeptide
MGVQVETISPGDGRTFPKRGQTCVVHYTGMLEDGKKVDSSRDRNKPFKFMLGKQEVIRGWEEGVAQMSVGQRAKLTISPDYAYGATGHPGIIPPHATLVFDVELLKLE

SEQ ID NO: 395 - DNA, 18 bp, Artificial Sequence
  Description of Artificial Sequence: Synthetic oligonucleotide
agcggaggaggatccgga

SEQ ID NO: 396 - protein, 6 aa, Artificial Sequence
  Description of Artificial Sequence: Synthetic peptide
SGGGSG

SEQ ID NO: 397 - DNA, 864 bp, Artificial Sequence; identical to SEQ ID NO: 46
  Description of Artificial Sequence: Synthetic polynucleotide

SEQ ID NO: 398 - DNA, 6 bp, Artificial Sequence
  Description of Artificial Sequence: Synthetic oligonucleotide
ccgcgg

SEQ ID NO: 399 - protein, 2 aa, Artificial Sequence
  Description of Artificial Sequence: Synthetic peptide
PR

SEQ ID NO: 400 - DNA, 54 bp, Artificial Sequence; identical to SEQ ID NO: 138
  Description of Artificial Sequence: Synthetic oligonucleotide

SEQ ID NO: 401 - protein, 18 aa, Artificial Sequence
  Description of Artificial Sequence: Synthetic peptide
EGRGSLLTCGDVEENPGP

SEQ ID NO: 402 - DNA, 6 bp, Artificial Sequence
  Description of Artificial Sequence: Synthetic oligonucleotide
ccatgg

SEQ ID NO: 403 - protein, 2 aa, Artificial Sequence
  Description of Artificial Sequence: Synthetic peptide
PW

SEQ ID NO: 404 - DNA, 63 bp, Artificial Sequence; identical to SEQ ID NO: 142
  Description of Artificial Sequence: Synthetic oligonucleotide

SEQ ID NO: 405 - protein, 21 aa, Artificial Sequence
  Description of Artificial Sequence: Synthetic peptide
MEFGLSWLFLVAILKGVQCSR

SEQ ID NO: 406 - DNA, 321 bp, Artificial Sequence; identical to SEQ ID NO: 144
  Description of Artificial Sequence: Synthetic polynucleotide

SEQ ID NO: 407 - protein, 107 aa, Artificial Sequence; identical to SEQ ID NO: 145
  Description of Artificial Sequence: Synthetic polypeptide

SEQ ID NO: 408 - DNA, 24 bp, Artificial Sequence
  Description of Artificial Sequence: Synthetic oligonucleotide
ggcggaggaagcggaggtgggggc

SEQ ID NO: 409 - protein, 8 aa, Artificial Sequence
  Description of Artificial Sequence: Synthetic peptide
GGGSGGGG

SEQ ID NO: 410 - DNA, 360 bp, Artificial Sequence; identical to SEQ ID NO: 148
  Description of Artificial Sequence: Synthetic polynucleotide

SEQ ID NO: 411 - protein, 120 aa, Artificial Sequence; identical to SEQ ID NO: 149
  Description of Artificial Sequence: Synthetic polypeptide

SEQ ID NO: 412 - DNA, 6 bp, Artificial Sequence
  Description of Artificial Sequence: Synthetic oligonucleotide
ggatcc

SEQ ID NO: 413 - protein, 2 aa, Artificial Sequence
  Description of Artificial Sequence: Synthetic peptide
GS

SEQ ID NO: 414 - DNA, 48 bp, Artificial Sequence; identical to SEQ ID NO: 152
  Description of Artificial Sequence: Synthetic oligonucleotide

SEQ ID NO: 415 - protein, 16 aa, Artificial Sequence
  Description of Artificial Sequence: Synthetic peptide
ELPTQGTFSNVSTNVS

SEQ ID NO: 416 - DNA, 126 bp, Artificial Sequence; identical to SEQ ID NO: 154
  Description of Artificial Sequence: Synthetic polynucleotide

SEQ ID NO: 417 - protein, 42 aa, Artificial Sequence; identical to SEQ ID NO: 155
  Description of Artificial Sequence: Synthetic polypeptide

SEQ ID NO: 418 - DNA, 111 bp, Artificial Sequence; identical to SEQ ID NO: 156
  Description of Artificial Sequence: Synthetic polynucleotide

SEQ ID NO: 419 - protein, 37 aa, Artificial Sequence; identical to SEQ ID NO: 157
  Description of Artificial Sequence: Synthetic polypeptide

SEQ ID NO: 420 - DNA, 6 bp, Artificial Sequence
  Description of Artificial Sequence: Synthetic oligonucleotide
gtcgac

SEQ ID NO: 421 - protein, 2 aa, Artificial Sequence
  Description of Artificial Sequence: Synthetic peptide
VD

SEQ ID NO: 422 - DNA, 516 bp, Artificial Sequence; identical to SEQ ID NO: 239
  Description of Artificial Sequence: Synthetic polynucleotide

SEQ ID NO: 423 - protein, 172 aa, Artificial Sequence; identical to SEQ ID NO: 240
  Description of Artificial Sequence: Synthetic polypeptide

SEQ ID NO: 424 - DNA, 186 bp, Artificial Sequence; identical to SEQ ID NO: 241
  Description of Artificial Sequence: Synthetic polynucleotide

SEQ ID NO: 425 - protein, 62 aa, Artificial Sequence; identical to SEQ ID NO: 216
  Description of Artificial Sequence: Synthetic polypeptide

SEQ ID NO: 426 - DNA, 336 bp, Artificial Sequence
  Description of Artificial Sequence: Synthetic polynucleotide
agagtgaagttcagcaggagcgcagacgcccccgcgtaccagcagggccagaaccagctctataacgagctcaatctaggacgaagagaggagtacgatgttttggacaagagacgtggccgggaccctgagatggggggaaagccgagaaggaagaaccctcaggaaggcctgtacaatgaactgcagaaagataagatggcggaggcctacagtgagattgggatgaaaggcgagcgccggaggggcaaggggcacgatggcctttaccagggtctcagtacagccaccaaggacacctacgacgcccttcacatgcaagctcttccacctcgt

SEQ ID NO: 427 - protein, 112 aa, Artificial Sequence; identical to SEQ ID NO: 161
  Description of Artificial Sequence: Synthetic polypeptide

SEQ ID NO: 428 - DNA, 3 bp, Artificial Sequence
  Description of Artificial Sequence: Synthetic oligonucleotide
acg

SEQ ID NO: 429 - protein, 1 aa, Artificial Sequence
  Description of Artificial Sequence: Synthetic peptide
T

SEQ ID NO: 430 - DNA, 261 bp, Artificial Sequence
  Description of Artificial Sequence: Synthetic polynucleotide
tggcacgaaggcctggaagaggcctcaagactttactttggtgaacgcaacgttaaaggcatgttcgaggtgctggaacccttgcatgcaatgatggagcgaggtcctcagacactcaaagagacatcttttaaccaggcgtatggacgggacctcatggaggctcaggaatggtgccgcaagtacatgaaaagtgggaatgtgaaggatctgctgcaagcatgggatctgtattaccacgtgtttagacggatcagcaaa

SEQ ID NO: 431 - protein, 87 aa, Artificial Sequence
  Description of Artificial Sequence: Synthetic polypeptide
WHEGLEEASRLYFGERNVKGMFEVLEPLHAMMERGPQTLKETSFNQAYGRDLMEAQEWCRKYMKSGNVKDLLQAWDLYYHVFRRISK

SEQ ID NO: 432 - DNA, 6 bp, Artificial Sequence
  Description of Artificial Sequence: Synthetic oligonucleotide
cgtacg

SEQ ID NO: 433 - protein, 2 aa, Artificial Sequence
  Description of Artificial Sequence: Synthetic peptide
RT

SEQ ID NO: 434 - DNA, 264 bp, Artificial Sequence
  Description of Artificial Sequence: Synthetic polynucleotide
tggcatgaagggttggaagaagcttcaaggctgtacttcggagagaggaacgtgaagggcatgtttgaggttcttgaacctctgcacgccatgatggaacggggaccgcagacactgaaagaaacctcttttaatcaggcctacggcagagacctgatggaggcccaagaatggtgtagaaagtatatgaaatccggtaacgtgaaagacctgctccaggcctgggacctttattaccatgtgttcaggcggatcagtaagtaa

SEQ ID NO: 435 - protein, 87 aa, Artificial Sequence; identical to SEQ ID NO: 431
  Description of Artificial Sequence: Synthetic polypeptide

SEQ ID NO: 436 - DNA, 324 bp, Artificial Sequence; identical to SEQ ID NO: 393
  Description of Artificial Sequence: Synthetic polynucleotide

SEQ ID NO: 437 - protein, 108 aa, Artificial Sequence; identical to SEQ ID NO: 394
  Description of Artificial Sequence: Synthetic polypeptide

SEQ ID NO: 438 - DNA, 18 bp, Artificial Sequence
  Description of Artificial Sequence: Synthetic oligonucleotide
agcggaggaggatccgga

SEQ ID NO: 439 - protein, 6 aa, Artificial Sequence
  Description of Artificial Sequence: Synthetic peptide
SGGGSG

SEQ ID NO: 440 - DNA, 864 bp, Artificial Sequence; identical to SEQ ID NO: 46
  Description of Artificial Sequence: Synthetic polynucleotide

SEQ ID NO: 441 - protein, 288 aa, Artificial Sequence; identical to SEQ ID NO: 45
  Description of Artificial Sequence: Synthetic polypeptide

SEQ ID NO: 442 - DNA, 6 bp, Artificial Sequence
  Description of Artificial Sequence: Synthetic oligonucleotide
ccgcgg

SEQ ID NO: 443 - protein, 2 aa, Artificial Sequence
  Description of Artificial Sequence: Synthetic peptide
PR

SEQ ID NO: 444 - DNA, 54 bp, Artificial Sequence; identical to SEQ ID NO: 313
  Description of Artificial Sequence: Synthetic oligonucleotide

SEQ ID NO: 445 - protein, 18 aa, Artificial Sequence
  Description of Artificial Sequence: Synthetic peptide
EGRGSLLTCGDVEENPGP

SEQ ID NO: 446 - DNA, 12 bp, Artificial Sequence
  Description of Artificial Sequence: Synthetic oligonucleotide
gcatgcgccacc

SEQ ID NO: 447 - protein, 4 aa, Artificial Sequence
  Description of Artificial Sequence: Synthetic peptide
ACAT

SEQ ID NO: 448 - DNA, 63 bp, Artificial Sequence
  Description of Artificial Sequence: Synthetic oligonucleotide
atggagtttgggttgtcatggttgtttctcgtcgctattctcaaaggtgtacaatgctcccgc

SEQ ID NO: 449 - protein, 21 aa, Artificial Sequence
  Description of Artificial Sequence: Synthetic peptide
MEFGLSWLFLVAILKGVQCSR

SEQ ID NO: 450 - DNA, 357 bp, Artificial Sequence; identical to SEQ ID NO: 168
  Description of Artificial Sequence: Synthetic polynucleotide

SEQ ID NO: 451 - protein, 119 aa, Artificial Sequence; identical to SEQ ID NO: 169
  Description of Artificial Sequence: Synthetic polypeptide

SEQ ID NO: 452 - DNA, 45 bp, Artificial Sequence
  Description of Artificial Sequence: Synthetic oligonucleotide
ggcggtggaggctccggtggaggcggctctggaggaggaggttca

SEQ ID NO: 453 - protein, 15 aa, Artificial Sequence
  Description of Artificial Sequence: Synthetic peptide
GGGGSGGGGSGGGGS

SEQ ID NO: 454 - DNA, 327 bp, Artificial Sequence; identical to SEQ ID NO: 164
  Description of Artificial Sequence: Synthetic polynucleotide

SEQ ID NO: 455 - protein, 109 aa, Artificial Sequence; identical to SEQ ID NO: 165
  Description of Artificial Sequence: Synthetic polypeptide

SEQ ID NO: 456 - DNA, 6 bp, Artificial Sequence
  Description of Artificial Sequence: Synthetic oligonucleotide
atgcat

SEQ ID NO: 457 - protein, 2 aa, Artificial Sequence
  Description of Artificial Sequence: Synthetic peptide
MH

SEQ ID NO: 458 - DNA, 48 bp, Artificial Sequence; identical to SEQ ID NO: 152
  Description of Artificial Sequence: Synthetic oligonucleotide

SEQ ID NO: 459 - protein, 16 aa, Artificial Sequence
  Description of Artificial Sequence: Synthetic peptide
ELPTQGTFSNVSTNVS

SEQ ID NO: 460 - DNA, 126 bp, Artificial Sequence; identical to SEQ ID NO: 154
  Description of Artificial Sequence: Synthetic polynucleotide

SEQ ID NO: 461 - protein, 42 aa, Artificial Sequence; identical to SEQ ID NO: 155
  Description of Artificial Sequence: Synthetic polypeptide

SEQ ID NO: 462 - DNA, 111 bp, Artificial Sequence; identical to SEQ ID NO: 156
  Description of Artificial Sequence: Synthetic polynucleotide

SEQ ID NO: 463 - protein, 37 aa, Artificial Sequence; identical to SEQ ID NO: 157
  Description of Artificial Sequence: Synthetic polypeptide

SEQ ID NO: 464 - DNA, 6 bp, Artificial Sequence
  Description of Artificial Sequence: Synthetic oligonucleotide
gtcgac

SEQ ID NO: 465 - protein, 2 aa, Artificial Sequence
  Description of Artificial Sequence: Synthetic peptide
VD

SEQ ID NO: 466 - DNA, 516 bp, Artificial Sequence; identical to SEQ ID NO: 239
  Description of Artificial Sequence: Synthetic polynucleotide

SEQ ID NO: 467 - protein, 172 aa, Artificial Sequence; identical to SEQ ID NO: 240
  Description of Artificial Sequence: Synthetic polypeptide

SEQ ID NO: 468 - DNA, 186 bp, Artificial Sequence; identical to SEQ ID NO: 241
  Description of Artificial Sequence: Synthetic polynucleotide

SEQ ID NO: 469 - protein, 62 aa, Artificial Sequence; identical to SEQ ID NO: 216
  Description of Artificial Sequence: Synthetic polypeptide

SEQ ID NO: 470 - DNA, 336 bp, Artificial Sequence; identical to SEQ ID NO: 426
  Description of Artificial Sequence: Synthetic polynucleotide

SEQ ID NO: 471 - protein, 112 aa, Artificial Sequence; identical to SEQ ID NO: 161
  Description of Artificial Sequence: Synthetic polypeptide

SEQ ID NO: 472 - DNA, 3 bp, Artificial Sequence
  Description of Artificial Sequence: Synthetic oligonucleotide
acg

SEQ ID NO: 473 - protein, 1 aa, Artificial Sequence
  Description of Artificial Sequence: Synthetic peptide
T

SEQ ID NO: 474 - DNA, 261 bp, Artificial Sequence; identical to SEQ ID NO: 430
  Description of Artificial Sequence: Synthetic polynucleotide

SEQ ID NO: 475 - protein, 87 aa, Artificial Sequence; identical to SEQ ID NO: 431
  Description of Artificial Sequence: Synthetic polypeptide

SEQ ID NO: 476 - DNA, 6 bp, Artificial Sequence
  Description of Artificial Sequence: Synthetic oligonucleotide
cgtacg

SEQ ID NO: 477 - protein, 2 aa, Artificial Sequence
  Description of Artificial Sequence: Synthetic peptide
RT

SEQ ID NO: 478 - DNA, 264 bp, Artificial Sequence; identical to SEQ ID NO: 434
  Description of Artificial Sequence: Synthetic polynucleotide

SEQ ID NO: 479 - protein, 87 aa, Artificial Sequence; identical to SEQ ID NO: 431
  Description of Artificial Sequence: Synthetic polypeptide

SEQ ID NO: 480 - DNA, 6 bp, Artificial Sequence
  Description of Artificial Sequence: Synthetic oligonucleotide
gccacc

SEQ ID NO: 481 - DNA, 324 bp, Artificial Sequence; identical to SEQ ID NO: 393
  Description of Artificial Sequence: Synthetic polynucleotide

SEQ ID NO: 482 - protein, 108 aa, Artificial Sequence; identical to SEQ ID NO: 394
  Description of Artificial Sequence: Synthetic polypeptide

SEQ ID NO: 483 - DNA, 18 bp, Artificial Sequence
  Description of Artificial Sequence: Synthetic oligonucleotide
agcggaggaggatccgga

SEQ ID NO: 484 - protein, 6 aa, Artificial Sequence
  Description of Artificial Sequence: Synthetic peptide
SGGGSG

SEQ ID NO: 485 - DNA, 864 bp, Artificial Sequence; identical to SEQ ID NO: 46
  Description of Artificial Sequence: Synthetic polynucleotide

SEQ ID NO: 486 - protein, 288 aa, Artificial Sequence; identical to SEQ ID NO: 45
  Description of Artificial Sequence: Synthetic polypeptide

SEQ ID NO: 487 - DNA, 6 bp, Artificial Sequence
  Description of Artificial Sequence: Synthetic oligonucleotide
ccgcgg

SEQ ID NO: 488 - protein, 2 aa, Artificial Sequence
  Description of Artificial Sequence: Synthetic peptide
PR

SEQ ID NO: 489 - DNA, 54 bp, Artificial Sequence; identical to SEQ ID NO: 313
  Description of Artificial Sequence: Synthetic oligonucleotide

SEQ ID NO: 490 - protein, 18 aa, Artificial Sequence
  Description of Artificial Sequence: Synthetic peptide
EGRGSLLTCGDVEENPGP

SEQ ID NO: 491 - DNA, 12 bp, Artificial Sequence
  Description of Artificial Sequence: Synthetic oligonucleotide
gcatgcgccacc

SEQ ID NO: 492 - protein, 4 aa, Artificial Sequence
  Description of Artificial Sequence: Synthetic peptide
ACAT

SEQ ID NO: 493 - DNA, 63 bp, Artificial Sequence; identical to SEQ ID NO: 448
  Description of Artificial Sequence: Synthetic oligonucleotide

SEQ ID NO: 494 - protein, 21 aa, Artificial Sequence
  Description of Artificial Sequence: Synthetic peptide
MEFGLSWLFLVAILKGVQCSR

SEQ ID NO: 495 - DNA, 357 bp, Artificial Sequence; identical to SEQ ID NO: 168
  Description of Artificial Sequence: Synthetic polynucleotide

SEQ ID NO: 496 - protein, 119 aa, Artificial Sequence; identical to SEQ ID NO: 169
  Description of Artificial Sequence: Synthetic polypeptide

SEQ ID NO: 497 - DNA, 45 bp, Artificial Sequence; identical to SEQ ID NO: 452
  Description of Artificial Sequence: Synthetic oligonucleotide

SEQ ID NO: 498 - protein, 15 aa, Artificial Sequence
  Description of Artificial Sequence: Synthetic peptide
GGGGSGGGGSGGGGS

SEQ ID NO: 499 - DNA, 327 bp, Artificial Sequence; identical to SEQ ID NO: 164
  Description of Artificial Sequence: Synthetic polynucleotide

SEQ ID NO: 500 - protein, 109 aa, Artificial Sequence; identical to SEQ ID NO: 165
  Description of Artificial Sequence: Synthetic polypeptide

SEQ ID NO: 501 - DNA, 6 bp, Artificial Sequence
  Description of Artificial Sequence: Synthetic oligonucleotide
atgcat

SEQ ID NO: 502 - protein, 2 aa, Artificial Sequence
  Description of Artificial Sequence: Synthetic peptide
MH

SEQ ID NO: 503 - DNA, 48 bp, Artificial Sequence; identical to SEQ ID NO: 152
  Description of Artificial Sequence: Synthetic oligonucleotide

SEQ ID NO: 504 - protein, 16 aa, Artificial Sequence
  Description of Artificial Sequence: Synthetic peptide
ELPTQGTFSNVSTNVS

SEQ ID NO: 505 - DNA, 126 bp, Artificial Sequence; identical to SEQ ID NO: 154
  Description of Artificial Sequence: Synthetic polynucleotide

SEQ ID NO: 506 - protein, 42 aa, Artificial Sequence; identical to SEQ ID NO: 155
  Description of Artificial Sequence: Synthetic polypeptide

SEQ ID NO: 507 - DNA, 111 bp, Artificial Sequence; identical to SEQ ID NO: 156
  Description of Artificial Sequence: Synthetic polynucleotide

SEQ ID NO: 508 - protein, 37 aa, Artificial Sequence; identical to SEQ ID NO: 157
  Description of Artificial Sequence: Synthetic polypeptide

SEQ ID NO: 509 - DNA, 6 bp, Artificial Sequence
  Description of Artificial Sequence: Synthetic oligonucleotide
gtcgac

SEQ ID NO: 510 - protein, 2 aa, Artificial Sequence
  Description of Artificial Sequence: Synthetic peptide
VD

SEQ ID NO: 511 - DNA, 516 bp, Artificial Sequence; identical to SEQ ID NO: 239
  Description of Artificial Sequence: Synthetic polynucleotide

SEQ ID NO: 512 - protein, 172 aa, Artificial Sequence; identical to SEQ ID NO: 240
  Description of Artificial Sequence: Synthetic polypeptide

SEQ ID NO: 513 - DNA, 186 bp, Artificial Sequence; identical to SEQ ID NO: 241
  Description of Artificial Sequence: Synthetic polynucleotide

SEQ ID NO: 514 - protein, 62 aa, Artificial Sequence; identical to SEQ ID NO: 216
  Description of Artificial Sequence: Synthetic polypeptide

SEQ ID NO: 515 - DNA, 339 bp, Artificial Sequence
  Description of Artificial Sequence: Synthetic polynucleotide
agagtgaagttcagcaggagcgcagacgcccccgcgtaccagcagggccagaaccagctctataacgagctcaatctaggacgaagagaggagtacgatgttttggacaagagacgtggccgggaccctgagatggggggaaagccgagaaggaagaaccctcaggaaggcctgtacaatgaactgcagaaagataagatggcggaggcctacagtgagattgggatgaaaggcgagcgccggaggggcaaggggcacgatggcctttaccagggtctcagtacagccaccaaggacacctacgacgcccttcacatgcaagctcttccacctcgttga

SEQ ID NO: 516 - protein, 112 aa, Artificial Sequence; identical to SEQ ID NO: 161
  Description of Artificial Sequence: Synthetic polypeptide

SEQ ID NO: 517 - DNA, 9 bp, Artificial Sequence
  Description of Artificial Sequence: Synthetic oligonucleotide
atgctcgag

SEQ ID NO: 518 - protein, 3 aa, Artificial Sequence
  Description of Artificial Sequence: Synthetic peptide
MLE

SEQ ID NO: 519 - DNA, 320 bp, Artificial Sequence
  Description of Artificial Sequence: Synthetic polynucleotide
ggagtgcaggtggagactatctccccaggagacgggcgcaccttccccaagcgcggccagacctgcgtggtgcactacaccgggatgcttgaagatggaaagaaagttgattcctcccgggacagaaacaagccctttaagtttatgctaggcaagcaggaggtgatccgaggctgggaagaaggggttgcccagatgagtgtgggtcagagagccaaactgactatatctccagattatgcctatggtgccactgggcacccaggcatcatcccaccacatgccactctcgtcttcgatgtggagcttctaaaactgga

SEQ ID NO: 520 - protein, 106 aa, Artificial Sequence
  Description of Artificial Sequence: Synthetic polypeptide
GVQVETISPGDGRTFPKRGQTCVVHYTGMLEDGKKVDSSRDRNKPFKFMLGKQEVIRGWEEGVAQMSVGQRAKLTISPDYAYGATGHPGIIPPHATLVFDVELLKL

SEQ ID NO: 521 - DNA, 19 bp, Artificial Sequence
  Description of Artificial Sequence: Synthetic oligonucleotide
atctggcggtggatccgga

SEQ ID NO: 522 - protein, 6 aa, Artificial Sequence
  Description of Artificial Sequence: Synthetic peptide
SGGGSG

SEQ ID NO: 523 - DNA, 921 bp, Artificial Sequence
  Description of Artificial Sequence: Synthetic polynucleotide
gtcgacggatttggtgatgtcggtgctcttgagagtttgaggggaaatgcagatttggcttacatcctgagcatggagccctgtggccactgcctcattatcaacaatgtgaacttctgccgtgagtccgggctccgcacccgcactggctccaacatcgactgtgagaagttgcggcgtcgcttctcctcgctgcatttcatggtggaggtgaagggcgacctgactgccaagaaaatggtgctggctttgctggagctggcgcggcaggaccacggtgctctggactgctgcgtggtggtcattctctctcacggctgtcaggccagccacctgcagttcccaggggctgtctacggcacagatggatgccctgtgtcggtcgagaagattgtgaacatcttcaatgggaccagctgccccagcctgggagggaagcccaagctctttttcatccaggcctgtggtggggagcagaaagaccatgggtttgaggtggcctccacttcccctgaagacgagtcccctggcagtaaccccgagccagatgccaccccgttccaggaaggtttgaggaccttcgaccagctggacgccatatctagtttgcccacacccagtgacatctttgtgtcctactctactttcccaggttttgtttcctggagggaccccaagagtggctcctggtacgttgagaccctggacgacatctttgagcagtgggctcactctgaagacctgcagtccctcctgcttagggtcgctaatgctgtttcggtgaaagggatttataaacagatgcctggttgctttaatttcctccggaaaaaacttttctttaaaacatcagctagcagagccgagggcaggggaagtcttctaacatgcggggacgtggaggaaaatcccgggccctga

SEQ ID NO: 524 - protein, 284 aa, Artificial Sequence
  Description of Artificial Sequence: Synthetic polypeptide
VDGFGDVGALESLRGNADLAYILSMEPCGHCLIINNVNFCRESGLRTRTGSNIDCEKLRRRFSSLHFMVEVKGDLTAKKMVLALLELARQDHGALDCCVVVILSHGCQASHLQFPGAVYGTDGCPVSVEKIVNIFNGTSCPSLGGKPKLFFIQACGGEQKDHGFEVASTSPEDESPGSNPEPDATPFQEGLRTFDQLDAISSLPTPSDIFVSYSTFPGFVSWRDPKSGSWYVETLDDIFEQWAHSEDLQSLLLRVANAVSVKGIYKQMPGCFNFLRKKLFFKTS

SEQ ID NO: 525 - DNA, 12 bp, Artificial Sequence
  Description of Artificial Sequence: Synthetic oligonucleotide
gctagcagagcc

SEQ ID NO: 526 - protein, 4 aa, Artificial Sequence
  Description of Artificial Sequence: Synthetic peptide
ASRA

SEQ ID NO: 527 - DNA, 57 bp, Artificial Sequence
  Description of Artificial Sequence: Synthetic oligonucleotide
gagggcaggggaagtcttctaacatgcggggacgtggaggaaaatcccgggccctga

SEQ ID NO: 528 - protein, 18 aa, Artificial Sequence
  Description of Artificial Sequence: Synthetic peptide
EGRGSLLTCGDVEENPGP

SEQ ID NO: 529 - DNA, 9 bp, Artificial Sequence
  Description of Artificial Sequence: Synthetic oligonucleotide
atgctcgag

SEQ ID NO: 530 - protein, 3 aa, Artificial Sequence
  Description of Artificial Sequence: Synthetic peptide
MLE

SEQ ID NO: 531 - DNA, 261 bp, Artificial Sequence
  Description of Artificial Sequence: Synthetic polynucleotide
tggcatgaagggttggaagaagcttcaaggctgtacttcggagagaggaacgtgaagggcatgtttgaggttcttgaacctctgcacgccatgatggaacggggaccgcagacactgaaagaaacctcttttaatcaggcctacggcagagacctgatggaggcccaagaatggtgtagaaagtatatgaaatccggtaacgtgaaagacctgctccaggcctgggacctttattaccatgtgttcaggcggatcagtaag

SEQ ID NO: 532 - protein, 107 aa, Artificial Sequence
  Description of Artificial Sequence: Synthetic polypeptide
GVQVETISPGDGRTFPKRGQTCVVHYTGMLEDGKKFDSSRDRNKPFKFMLGKQEVIRGWEEGVAQMSVGQRAKLTISPDYAYGATGHPPKIPPHATLVFDVELLKLE

SEQ ID NO: 533 - DNA, 24 bp, Artificial Sequence
  Description of Artificial Sequence: Synthetic oligonucleotide
tcaggcggtggctcaggtgtcgag

SEQ ID NO: 534 - protein, 8 aa, Artificial Sequence
  Description of Artificial Sequence: Synthetic peptide
SGGGSGVD

SEQ ID NO: 535 - DNA, 864 bp, Artificial Sequence; identical to SEQ ID NO: 44
  Description of Artificial Sequence: Synthetic polynucleotide

SEQ ID NO: 536 - protein, 287 aa, Artificial Sequence
  Description of Artificial Sequence: Synthetic polypeptide
DGFGDVGALESLRGNADLAYILSMEPCGHCLIINNVNFCRESGLRTRTGSNIDCEKLRRRFSSLHFMVEVKGDLTAKKMVLALLELARQDHGALDCCVVVILSHGCQASHLQFPGAVYGTDGCPVSVEKIVNIFNGTSCPSLGGKPKLFFIQACGGEQKDHGFEVASTSPEDESPGSNPEPDATPFQEGLRTFDQLDAISSLPTPSDIFVSYSTFPGFVSWRDPKSGSWYVETLDDIFEQWAHSEDLQSLLLRVANAVSVKGIYKQMPGCFNFLRKKLFFKTSASRA

SEQ ID NO: 537 - DNA, 57 bp, Artificial Sequence; identical to SEQ ID NO: 527
  Description of Artificial Sequence: Synthetic oligonucleotide

SEQ ID NO: 538 - protein, 18 aa, Artificial Sequence
  Description of Artificial Sequence: Synthetic peptide
EGRGSLLTCGDVEENPGP

SEQ ID NO: 539 - DNA, 270 bp, Artificial Sequence
  Description of Artificial Sequence: Synthetic polynucleotide
atgctcgagtggcatgaaggcctggaagaggcatctcgtttgtactttggggaaaggaacgtgaaaggcatgtttgaggtgctggagcccttgcacgctatgatggaacggggcccccagactctgaaggaaacatcctttaatcaggcctatggtcgagatttaatggaggcccaagagtggtgcaggaagtacatgaaatcagggaatgtcaaggacctcctccaagcctgggacctctattatcatgtgttccgacgaatctcaaag

SEQ ID NO: 540 - protein, 90 aa, Artificial Sequence
  Description of Artificial Sequence: Synthetic polypeptide
MLEWHEGLEEASRLYFGERNVKGMFEVLEPLHAMMERGPQTLKETSFNQAYGRDLMEAQEWCRKYMKSGNVKDLLQAWDLYYHVFRRISK

SEQ ID NO: 541 - DNA, 6 bp, Artificial Sequence
  Description of Artificial Sequence: Synthetic oligonucleotide
gtcgag

SEQ ID NO: 542 - protein, 2 aa, Artificial Sequence
  Description of Artificial Sequence: Synthetic peptide
VD

SEQ ID NO: 543 - DNA, 261 bp, Artificial Sequence; identical to SEQ ID NO: 531
  Description of Artificial Sequence: Synthetic polynucleotide

SEQ ID NO: 544 - protein, 87 aa, Artificial Sequence; identical to SEQ ID NO: 431
  Description of Artificial Sequence: Synthetic polypeptide

SEQ ID NO: 545 - DNA, 24 bp, Artificial Sequence
  Description of Artificial Sequence: Synthetic oligonucleotide
tcaggcggtggctcaggtgtcgag

SEQ ID NO: 546 - protein, 8 aa, Artificial Sequence
  Description of Artificial Sequence: Synthetic peptide
SGGGSGVD

SEQ ID NO: 547 - DNA, 261 bp, Artificial Sequence
  Description of Artificial Sequence: Synthetic polynucleotide
tggcatgaaggcctggaagaggcatctcgtttgtactttggggaaaggaacgtgaaaggcatgtttgaggtgctggagcccttgcacgctatgatggaacggggcccccagactctgaaggaaacatcctttaatcaggcctatggtcgagatttaatggaggcccaagagtggtgcaggaagtacatgaaatcagggaatgtcaaggacctcctccaagcctgggacctctattatcatgtgttccgacgaatctcaaag

SEQ ID NO: 548 - protein, 87 aa, Artificial Sequence; identical to SEQ ID NO: 431
  Description of Artificial Sequence: Synthetic polypeptide

SEQ ID NO: 549 - DNA, 6 bp, Artificial Sequence
  Description of Artificial Sequence: Synthetic oligonucleotide
gtcgac

SEQ ID NO: 550 - protein, 2 aa, Artificial Sequence
  Description of Artificial Sequence: Synthetic peptide
VD

SEQ ID NO: 551 - DNA, 285 bp, Artificial Sequence
  Description of Artificial Sequence: Synthetic polynucleotide
tggcatgaagggttggaagaagcttcaaggctgtacttcggagagaggaacgtgaagggcatgtttgaggttcttgaacctctgcacgccatgatggaacggggaccgcagacactgaaagaaacctcttttaatcaggcctacggcagagacctgatggaggcccaagaatggtgtagaaagtatatgaaatccggtaacgtgaaagacctgctccaggcctgggacctttattaccatgtgttcaggcggatcagtaagtcaggcggtggctcaggtgtcgac

SEQ ID NO: 552 - protein, 87 aa, Artificial Sequence; identical to SEQ ID NO: 431
  Description of Artificial Sequence: Synthetic polypeptide

SEQ ID NO: 553 - DNA, 6 bp, Artificial Sequence
  Description of Artificial Sequence: Synthetic oligonucleotide
gtcgac

SEQ ID NO: 554 - protein, 2 aa, Artificial Sequence
  Description of Artificial Sequence: Synthetic peptide
VE

SEQ ID NO: 555 - DNA, 36 bp, Artificial Sequence
  Description of Artificial Sequence: Synthetic oligonucleotide
tatccgtacgacgtaccagactacgcactcgactaa

SEQ ID NO: 556 - protein, 11 aa, Artificial Sequence
  Description of Artificial Sequence: Synthetic peptide
YPYDVPDYALD

SEQ ID NO: 557 - DNA, 51 bp, Artificial Sequence
  Description of Artificial Sequence: Synthetic oligonucleotide
atgggctgtgtgcaatgtaaggataaagaagcaacaaaactgacggaggag

SEQ ID NO: 558 - protein, 17 aa, Artificial Sequence
  Description of Artificial Sequence: Synthetic peptide
MGCVQCKDKEATKLTEE

SEQ ID NO: 559 - DNA, 6 bp, Artificial Sequence
  Description of Artificial Sequence: Synthetic oligonucleotide
ctcgag

SEQ ID NO: 560 - protein, 2 aa, Artificial Sequence
  Description of Artificial Sequence: Synthetic peptide
LG

SEQ ID NO: 561 - DNA, 261 bp, Artificial Sequence; identical to SEQ ID NO: 547
  Description of Artificial Sequence: Synthetic polynucleotide

SEQ ID NO: 562 - protein, 90 aa, Artificial Sequence; identical to SEQ ID NO: 540
  Description of Artificial Sequence: Synthetic polypeptide

SEQ ID NO: 563 - DNA, 6 bp, Artificial Sequence
  Description of Artificial Sequence: Synthetic oligonucleotide
gtcgag

SEQ ID NO: 564 - protein, 2 aa, Artificial Sequence
  Description of Artificial Sequence: Synthetic peptide
VD

SEQ ID NO: 565 - DNA, 261 bp, Artificial Sequence; identical to SEQ ID NO: 531
  Description of Artificial Sequence: Synthetic polynucleotide

SEQ ID NO: 566 - protein, 87 aa, Artificial Sequence; identical to SEQ ID NO: 431
  Description of Artificial Sequence: Synthetic polypeptide

SEQ ID NO: 567 - DNA, 19 bp, Artificial Sequence
  Description of Artificial Sequence: Synthetic oligonucleotide
tcaggcggtggctcaggtg

SEQ ID NO: 568 - protein, 8 aa, Artificial Sequence
  Description of Artificial Sequence: Synthetic peptide
SGGGSGVD

SEQ ID NO: 569 - DNA, 36 bp, Artificial Sequence; identical to SEQ ID NO: 555
  Description of Artificial Sequence: Synthetic oligonucleotide

SEQ ID NO: 570 - protein, 11 aa, Artificial Sequence
  Description of Artificial Sequence: Synthetic peptide
YPYDVPDYALD

SEQ ID NO: 571 - DNA, 9 bp, Artificial Sequence
  Description of Artificial Sequence: Synthetic oligonucleotide
atgctcgag

SEQ ID NO: 572 - protein, 3 aa, Artificial Sequence
  Description of Artificial Sequence: Synthetic peptide
MLE

SEQ ID NO: 573 - DNA, 321 bp, Artificial Sequence
  Description of Artificial Sequence: Synthetic polynucleotide
ggcgtccaagtcgaaaccattagtcccggcgatggcagaacatttcctaaaaggggacaaacatgtgtcgtccattatacaggcatgttggaggacggcaaaaagttcgacagtagtagagatcgcaataaacctttcaaattcatgttgggaaaacaagaagtcattaggggatgggaggagggcgtggctcaaatgtccgtcggccaacgcgctaagctcaccatcagccccgactacgcatacggcgctaccggacatccccctaagattccccctcacgctaccttggtgtttgacgtcgaactgttgaagctcgaa

SEQ ID NO: 574 - protein, 107 aa, Artificial Sequence; identical to SEQ ID NO: 532
  Description of Artificial Sequence: Synthetic polypeptide

SEQ ID NO: 575 - DNA, 6 bp, Artificial Sequence
  Description of Artificial Sequence: Synthetic oligonucleotide
gtcgag

SEQ ID NO: 576 - protein, 2 aa, Artificial Sequence
  Description of Artificial Sequence: Synthetic peptide
VD

SEQ ID NO: 577 - DNA, 321 bp, Artificial Sequence
  Description of Artificial Sequence: Synthetic polynucleotide
ggagtgcaggtggagactatctccccaggagacgggcgcaccttccccaagcgcggccagacctgcgtggtgcactacaccgggatgcttgaagatggaaagaaattcgattcctctcgggacagaaacaagccctttaagtttatgctaggcaagcaggaggtgatccgaggctgggaagaaggggttgcccagatgagtgtgggtcagagagccaaactgactatatctccagattatgcctatggtgccactgggcacccacctaagatcccaccacatgccactctcgtcttcgatgtggagcttctaaaactggaa

SEQ ID NO: 578 - protein, 107 aa, Artificial Sequence; identical to SEQ ID NO: 532
  Description of Artificial Sequence: Synthetic polypeptide

SEQ ID NO: 579 - DNA, 24 bp, Artificial Sequence
  Description of Artificial Sequence: Synthetic oligonucleotide
tcaggcggtggctcaggtgtcgag

SEQ ID NO: 580 - protein, 8 aa, Artificial Sequence
  Description of Artificial Sequence: Synthetic peptide
SGGGSGVD

SEQ ID NO: 581 - DNA, 321 bp, Artificial Sequence; identical to SEQ ID NO: 573
  Description of Artificial Sequence: Synthetic polynucleotide

SEQ ID NO: 582 - protein, 107 aa, Artificial Sequence; identical to SEQ ID NO: 532
  Description of Artificial Sequence: Synthetic polypeptide

SEQ ID NO: 583 - DNA, 6 bp, Artificial Sequence
  Description of Artificial Sequence: Synthetic oligonucleotide
gtcgac

SEQ ID NO: 584 - protein, 2 aa, Artificial Sequence
  Description of Artificial Sequence: Synthetic peptide
VD

SEQ ID NO: 585 - DNA, 321 bp, Artificial Sequence; identical to SEQ ID NO: 577
  Description of Artificial Sequence: Synthetic polynucleotide

SEQ ID NO: 586 - protein, 107 aa, Artificial Sequence; identical to SEQ ID NO: 532
  Description of Artificial Sequence: Synthetic polypeptide

SEQ ID NO: 587 - DNA, 24 bp, Artificial Sequence
  Description of Artificial Sequence: Synthetic oligonucleotide
tcaggcggtggctcaggtgtcgag

SEQ ID NO: 588 - protein, 8 aa, Artificial Sequence
  Description of Artificial Sequence: Synthetic peptide
SGGGSGVD

SEQ ID NO: 589 - DNA, 36 bp, Artificial Sequence; identical to SEQ ID NO: 555
  Description of Artificial Sequence: Synthetic oligonucleotide

SEQ ID NO: 590 - protein, 11 aa, Artificial Sequence
  Description of Artificial Sequence: Synthetic peptide
YPYDVPDYALD

SEQ ID NO: 591 - DNA, 330 bp, Artificial Sequence
  Description of Artificial Sequence: Synthetic polynucleotide
atgctcgagggagtgcaggtggagactatctccccaggagacgggcgcaccttccccaagcgcggccagacctgcgtggtgcactacaccgggatgcttgaagatggaaagaaagttgattcctcccgggacagaaacaagccctttaagtttatgctaggcaagcaggaggtgatccgaggctgggaagaaggggttgcccagatgagtgtgggtcagagagccaaactgactatatctccagattatgcctatggtgccactgggcacccaggcatcatcccaccacatgccactctcgtcttcgatgtggagcttctaaaactggaa

SEQ ID NO: 592 - protein, 110 aa, Artificial Sequence; identical to SEQ ID NO: 36
  Description of Artificial Sequence: Synthetic polypeptide

SEQ ID NO: 593 - DNA, 18 bp, Artificial Sequence
  Description of Artificial Sequence: Synthetic oligonucleotide
tctggcggtggatccgga

SEQ ID NO: 594 - protein, 6 aa, Artificial Sequence
  Description of Artificial Sequence: Synthetic peptide
SGGGSG

SEQ ID NO: 595 - DNA, 864 bp, Artificial Sequence; identical to SEQ ID NO: 44
  Description of Artificial Sequence: Synthetic polynucleotide

SEQ ID NO: 596 - protein, 288 aa, Artificial Sequence; identical to SEQ ID NO: 45
  Description of Artificial Sequence: Synthetic polypeptide

SEQ ID NO: 597 - DNA, 54 bp, Artificial Sequence; identical to SEQ ID NO: 313
  Description of Artificial Sequence: Synthetic oligonucleotide

SEQ ID NO: 598 - protein, 18 aa, Artificial Sequence
  Description of Artificial Sequence: Synthetic peptide
EGRGSLLTCGDVEENPGP

SEQ ID NO: 599 - DNA, 1002 bp, Artificial Sequence
  Description of Artificial Sequence: Synthetic polynucleotide
atgccacctcctcgcctcctcttcttcctcctcttcctcacccccatggaagtcaggcccgaggaacctctagtggtgaaggtggaagagggagataacgctgtgctgcagtgcctcaaggggacctcagatggccccactcagcagctgacctggtctcgggagtccccgcttaaacccttcttaaaactcagcctggggctgccaggcctgggaatccacatgaggcccctggccatctggcttttcatcttcaacgtctctcaacagatggggggcttctacctgtgccagccggggcccccctctgagaaggcctggcagcctggctggacagtcaatgtggagggcagcggggagctgttccggtggaatgtttcggacctaggtggcctgggctgtggcctgaagaacaggtcctcagagggccccagctccccttccgggaagctcatgagccccaagctgtatgtgtgggccaaagaccgccctgagatctgggagggagagcctccgtgtctcccaccgagggacagcctgaaccagagcctcagccaggacctcaccatggcccctggctccacactctggctgtcctgtggggtaccccctgactctgtgtccaggggccccctctcctggacccatgtgcaccccaaggggcctaagtcattgctgagcctagagctgaaggacgatcgcccggccagagatatgtgggtaatggagacgggtctgttgttgccccgggccacagctcaagacgctggaaagtattattgtcaccgtggcaacctgaccatgtcattccacctggagatcactgctcggccagtactatggcactggctgctgaggactggtggctggaaggtctcagctgtgactttggcttatctgatcttctgcctgtgttcccttgtgggcattcttcatcttcaaagagccctggtcctgaggaggaaaagaaagcgaatgactgaccccaccaggagattctaa

SEQ ID NO: 600 - protein, 333 aa, Artificial Sequence; identical to SEQ ID NO: 15
  Description of Artificial Sequence: Synthetic polypeptide

SEQ ID NO: 601 - DNA, 330 bp, Artificial Sequence; identical to SEQ ID NO: 591
  Description of Artificial Sequence: Synthetic polynucleotide

SEQ ID NO: 602 - protein, 110 aa, Artificial Sequence; identical to SEQ ID NO: 36
  Description of Artificial Sequence: Synthetic polypeptide

SEQ ID NO: 603 - DNA, 18 bp, Artificial Sequence
  Description of Artificial Sequence: Synthetic oligonucleotide
tctggcggtggatccgga

SEQ ID NO: 604 - protein, 6 aa, Artificial Sequence
  Description of Artificial Sequence: Synthetic peptide
SGGGSG

SEQ ID NO: 605 - DNA, 864 bp, Artificial Sequence; identical to SEQ ID NO: 44
  Description of Artificial Sequence: Synthetic polynucleotide

SEQ ID NO: 606 - protein, 288 aa, Artificial Sequence; identical to SEQ ID NO: 45
  Description of Artificial Sequence: Synthetic polypeptide

SEQ ID NO: 607 - DNA, 54 bp, Artificial Sequence; identical to SEQ ID NO: 313
  Description of Artificial Sequence: Synthetic oligonucleotide

SEQ ID NO: 608 - protein, 18 aa, Artificial Sequence
  Description of Artificial Sequence: Synthetic peptide
EGRGSLLTCGDVEENPGP

SEQ ID NO: 609 - DNA, 999 bp, Artificial Sequence; identical to SEQ ID NO: 14
  Description of Artificial Sequence: Synthetic polynucleotide

SEQ ID NO: 610 - protein, 333 aa, Artificial Sequence; identical to SEQ ID NO: 15
  Description of Artificial Sequence: Synthetic polypeptide

SEQ ID NO: 611 - DNA, 9 bp, Artificial Sequence
  Description of Artificial Sequence: Synthetic oligonucleotide
gggagtggg

SEQ ID NO: 612 - protein, 3 aa, Artificial Sequence
  Description of Artificial Sequence: Synthetic peptide
GSG

SEQ ID NO: 613 - DNA, 57 bp, Artificial Sequence
  Description of Artificial Sequence: Synthetic oligonucleotide
gctacgaattttagcttgctgaagcaggccggtgatgtggaagagaaccccgggcct

SEQ ID NO: 614 - protein, 19 aa, Artificial Sequence
  Description of Artificial Sequence: Synthetic peptide
ATNFSLLKQAGDVEENPGP

SEQ ID NO: 615 - DNA, 264 bp, Artificial Sequence
  Description of Artificial Sequence: Synthetic polynucleotide
tggcacgaaggtttggaagaggcctcccgcctgtatttcggtgagagaaatgtcaaaggtatgtttgaagtgcttgagcccctgcacgccatgatggaacgggggccgcagactctgaaagaaacctcattcaaccaggcatacgggcgagacctgatggaagcgcaggaatggtgtaggaagtacatgaagtccggaaatgtgaaggacttgctccaggcttgggacctgtactatcacgtatttcggagaataagcaagtaa

SEQ ID NO: 616 - protein, 87 aa, Artificial Sequence; identical to SEQ ID NO: 431
  Description of Artificial Sequence: Synthetic polypeptide

SEQ ID NO: 617 - DNA, 330 bp, Artificial Sequence; identical to SEQ ID NO: 591
  Description of Artificial Sequence: Synthetic polynucleotide

SEQ ID NO: 618 - protein, 110 aa, Artificial Sequence; identical to SEQ ID NO: 36
  Description of Artificial Sequence: Synthetic polypeptide

SEQ ID NO: 619 - DNA, 18 bp, Artificial Sequence
  Description of Artificial Sequence: Synthetic oligonucleotide
tctggcggtggatccgga

SEQ ID NO: 620 - protein, 6 aa, Artificial Sequence
  Description of Artificial Sequence: Synthetic peptide
SGGGSG

SEQ ID NO: 621 - DNA, 864 bp, Artificial Sequence; identical to SEQ ID NO: 44
  Description of Artificial Sequence: Synthetic polynucleotide

SEQ ID NO: 622 - protein, 288 aa, Artificial Sequence; identical to SEQ ID NO: 45
  Description of Artificial Sequence: Synthetic polypeptide

SEQ ID NO: 623 - DNA, 54 bp, Artificial Sequence; identical to SEQ ID NO: 313
  Description of Artificial Sequence: Synthetic oligonucleotide

SEQ ID NO: 624 - protein, 18 aa, Artificial Sequence
  Description of Artificial Sequence: Synthetic peptide
EGRGSLLTCGDVEENPGP

SEQ ID NO: 625 - DNA, 999 bp, Artificial Sequence; identical to SEQ ID NO: 14
  Description of Artificial Sequence: Synthetic polynucleotide

SEQ ID NO: 626 - protein, 333 aa, Artificial Sequence; identical to SEQ ID NO: 15
  Description of Artificial Sequence: Synthetic polypeptide

SEQ ID NO: 627 - DNA, 9 bp, Artificial Sequence
  Description of Artificial Sequence: Synthetic oligonucleotide
gggagtggg

SEQ ID NO: 628 - protein, 3 aa, Artificial Sequence
  Description of Artificial Sequence: Synthetic peptide
GSG

SEQ ID NO: 629 - DNA, 57 bp, Artificial Sequence; identical to SEQ ID NO: 613
  Description of Artificial Sequence: Synthetic oligonucleotide

SEQ ID NO: 630 - protein, 19 aa, Artificial Sequence
  Description of Artificial Sequence: Synthetic peptide
ATNFSLLKQAGDVEENPGP

SEQ ID NO: 631 - DNA, 261 bp, Artificial Sequence
  Description of Artificial Sequence: Synthetic polynucleotide
tggcatgaaggtctggaagaagcttctcgcctttattttggcgaacggaacgtaaaaggtatgtttgaagtcctggagccattgcacgccatgatggagcgcgggcctcagaccctcaaggaaaccagttttaatcaggcctatgggcgagacctcatggaggcacaggaatggtgtcggaagtatatgaagtccggcaacgttaaggatctcttgcaggcctgggacttgtattatcacgtgttccggcgaatcagcaag

SEQ ID NO: 632 - protein, 87 aa, Artificial Sequence; identical to SEQ ID NO: 431
  Description of Artificial Sequence: Synthetic polypeptide

SEQ ID NO: 633 - DNA, 6 bp, Artificial Sequence
  Description of Artificial Sequence: Synthetic oligonucleotide
cgtacg

SEQ ID NO: 634 - protein, 2 aa, Artificial Sequence
  Description of Artificial Sequence: Synthetic peptide
RT

SEQ ID NO: 635 - DNA, 264 bp, Artificial Sequence; identical to SEQ ID NO: 615
  Description of Artificial Sequence: Synthetic polynucleotide

SEQ ID NO: 636 - protein, 87 aa, Artificial Sequence; identical to SEQ ID NO: 431
  Description of Artificial Sequence: Synthetic polypeptide

SEQ ID NO: 637 - DNA, 330 bp, Artificial Sequence; identical to SEQ ID NO: 591
  Description of Artificial Sequence: Synthetic polynucleotide

SEQ ID NO: 638 - protein, 110 aa, Artificial Sequence; identical to SEQ ID NO: 36
  Description of Artificial Sequence: Synthetic polypeptide

SEQ ID NO: 639 - DNA, 18 bp, Artificial Sequence
  Description of Artificial Sequence: Synthetic oligonucleotide
tctggcggtggatccgga

SEQ ID NO: 640 - protein, 6 aa, Artificial Sequence
  Description of Artificial Sequence: Synthetic peptide
SGGGSG

SEQ ID NO: 641 - DNA, 864 bp, Artificial Sequence; identical to SEQ ID NO: 44
  Description of Artificial Sequence: Synthetic polynucleotide

SEQ ID NO: 642 - protein, 288 aa, Artificial Sequence; identical to SEQ ID NO: 45
  Description of Artificial Sequence: Synthetic polypeptide

SEQ ID NO: 643 - DNA, 54 bp, Artificial Sequence; identical to SEQ ID NO: 313
  Description of Artificial Sequence: Synthetic oligonucleotide

SEQ ID NO: 644 - protein, 18 aa, Artificial Sequence
  Description of Artificial Sequence: Synthetic peptide
EGRGSLLTCGDVEENPGP

SEQ ID NO: 645 - DNA, 999 bp, Artificial Sequence; identical to SEQ ID NO: 14
  Description of Artificial Sequence: Synthetic polynucleotide

SEQ ID NO: 646 - protein, 333 aa, Artificial Sequence; identical to SEQ ID NO: 15
  Description of Artificial Sequence: Synthetic polypeptide

SEQ ID NO: 647 - DNA, 9 bp, Artificial Sequence
  Description of Artificial Sequence: Synthetic oligonucleotide
gggagtggg

SEQ ID NO: 648 - protein, 3 aa, Artificial Sequence
  Description of Artificial Sequence: Synthetic peptide
GSG

SEQ ID NO: 649 - DNA, 57 bp, Artificial Sequence; identical to SEQ ID NO: 613
  Description of Artificial Sequence: Synthetic oligonucleotide

SEQ ID NO: 650 - protein, 19 aa, Artificial Sequence
  Description of Artificial Sequence: Synthetic peptide
ATNFSLLKQAGDVEENPGP

SEQ ID NO: 651 - DNA, 261 bp, Artificial Sequence; identical to SEQ ID NO: 631
  Description of Artificial Sequence: Synthetic polynucleotide

SEQ ID NO: 652 - protein, 87 aa, Artificial Sequence; identical to SEQ ID NO: 431
  Description of Artificial Sequence: Synthetic polypeptide

SEQ ID NO: 653 - DNA, 6 bp, Artificial Sequence
  Description of Artificial Sequence: Synthetic oligonucleotide
cgtacg

SEQ ID NO: 654 - protein, 2 aa, Artificial Sequence
  Description of Artificial Sequence: Synthetic peptide
RT

SEQ ID NO: 655 - DNA, 261 bp, Artificial Sequence
  Description of Artificial Sequence: Synthetic polynucleotide
tggcacgaaggtctggacgaggctagtagactgtatttcggcgagagaaatgtaaagggaatgttcgaggtactggagcctctgcacgccatgatggaacgcggccctcagacactcaaggagactagttttaaccaggcctatggcagggatctgatggaggctcaggaatggtgccggaagtatatgaaaagcggtaacgtgaaggacctgctgcaggcctgggatctgtattatcacgtgtttagaagaatctctaaa

SEQ ID NO: 656 - protein, 87 aa, Artificial Sequence
  Description of Artificial Sequence: Synthetic polypeptide
WHEGLDEASRLYFGERNVKGMFEVLEPLHAMMERGPQTLKETSFNQAYGRDLMEAQEWCRKYMKSGNVKDLLQAWDLYYHVFRRISK

SEQ ID NO: 657 - DNA, 6 bp, Artificial Sequence
  Description of Artificial Sequence: Synthetic oligonucleotide
cgtacg

SEQ ID NO: 658 - protein, 2 aa, Artificial Sequence
  Description of Artificial Sequence: Synthetic peptide
RT

SEQ ID NO: 659 - DNA, 264 bp, Artificial Sequence; identical to SEQ ID NO: 615
  Description of Artificial Sequence: Synthetic polynucleotide

SEQ ID NO: 660 - protein, 87 aa, Artificial Sequence; identical to SEQ ID NO: 431
  Description of Artificial Sequence: Synthetic polypeptide

SEQ ID NO: 661 - DNA, 261 bp, Artificial Sequence
  Description of Artificial Sequence: Synthetic polynucleotide
tggcacgaggggctggaggaggcaagtcgactgtattttggagaacgcaacgtaaagggaatgtttgaggtgctcgaaccactccatgctatgatggaaagggggcctcagactcttaaggaaacaagttttaatcaagcctacggacgagacctcatggaggcgcaggagtggtgcagaaaatacatgaaatcaggtaatgttaaggacctgctgcaggcatgggacctgtactaccatgtcttcaggcgcatctcaaag

SEQ ID NO: 662 - protein, 87 aa, Artificial Sequence; identical to SEQ ID NO: 431
  Description of Artificial Sequence: Synthetic polypeptide

SEQ ID NO: 663 - DNA, 30 bp, Artificial Sequence
  Description of Artificial Sequence: Synthetic oligonucleotide
atgcattctggtggaggatcaggcgttgaa

SEQ ID NO: 664 - protein, 10 aa, Artificial Sequence
  Description of Artificial Sequence: Synthetic peptide
MHSGGGSGVE

SEQ ID NO: 665 - DNA, 513 bp, Artificial Sequence
  Description of Artificial Sequence: Synthetic polynucleotide
gcagctggaggccctggcgcaggctctgcagcccctgtatctagcacctcttctcttcctctggctgcgctgaacatgagagtgcggagacggttgtctttgttcttgaatgtcagaacacaggttgcagcggactggaccgctctggccgaggaaatggacttcgagtacctggagatcaggcaactcgaaacgcaggcagatcctacaggcagactgttggatgcgtggcagggacggcccggagccagcgttggacggctccttgatcttctcaccaagctgggcagagatgacgtgctgctggaattgggccccagtattgaggaggactgccaaaaatacatcttgaagcagcaacaggaggaggcggagaagcccctccaggtcgcagccgtcgattcatccgtgcctagaacagccgaacttgcaggcatcactaccctggatgatcccctgggccatatgccagagaggtttgatgcgtttatctgctattgcccaagcgatatc

SEQ ID NO: 666 - protein, 171 aa, Artificial Sequence; identical to SEQ ID NO: 214
  Description of Artificial Sequence: Synthetic polypeptide

SEQ ID NO: 667 - DNA, 6 bp, Artificial Sequence
  Description of Artificial Sequence: Synthetic oligonucleotide
gttgag

SEQ ID NO: 668 - protein, 2 aa, Artificial Sequence
  Description of Artificial Sequence: Synthetic peptide
VE

SEQ ID NO: 669 - DNA, 186 bp, Artificial Sequence
  Description of Artificial Sequence: Synthetic polynucleotide
aagaaggtggccaagaagccaaccaataaagctccacatcctaaacaggagccacaagaaatcaactttccagatgatctccctggctctaatactgcagcccccgtgcaggaaaccctgcacggctgtcaacctgtgacacaggaagacgggaaggaaagcaggatatccgtgcaggaacggcaa

SEQ ID NO: 670 - protein, 62 aa, Artificial Sequence; identical to SEQ ID NO: 216
  Description of Artificial Sequence: Synthetic polypeptide

SEQ ID NO: 671 - DNA, 6 bp, Artificial Sequence
  Description of Artificial Sequence: Synthetic oligonucleotide
gtcgac

SEQ ID NO: 672 - protein, 2 aa, Artificial Sequence
  Description of Artificial Sequence: Synthetic peptide
VD

SEQ ID NO: 673 - DNA, 27 bp, Artificial Sequence
  Description of Artificial Sequence: Synthetic oligonucleotide
tacccatacgacgtgccagattatgct

SEQ ID NO: 674 - protein, 9 aa, Artificial Sequence
  Description of Artificial Sequence: Synthetic peptide
YPYDVPDYA

SEQ ID NO: 675 - DNA, 6 bp, Artificial Sequence
  Description of Artificial Sequence: Synthetic oligonucleotide
ccgcgg

SEQ ID NO: 676 - protein, 2 aa, Artificial Sequence
  Description of Artificial Sequence: Synthetic peptide
PR

SEQ ID NO: 677 - DNA, 54 bp, Artificial Sequence; identical to SEQ ID NO: 138
  Description of Artificial Sequence: Synthetic oligonucleotide

SEQ ID NO: 678 - protein, 18 aa, Artificial Sequence
  Description of Artificial Sequence: Synthetic peptide
EGRGSLLTCGDVEENPGP

SEQ ID NO: 679 - DNA, 1002 bp, Artificial Sequence; identical to SEQ ID NO: 309
  Description of Artificial Sequence: Synthetic polynucleotide

SEQ ID NO: 680 - protein, 333 aa, Artificial Sequence; identical to SEQ ID NO: 15
  Description of Artificial Sequence: Synthetic polypeptide

SEQ ID NO: 681 - DNA, 9 bp, Artificial Sequence
  Description of Artificial Sequence: Synthetic oligonucleotide
atgctcgag

SEQ ID NO: 682 - protein, 3 aa, Artificial Sequence
  Description of Artificial Sequence: Synthetic peptide
MLE

SEQ ID NO: 683 - DNA, 261 bp, Artificial Sequence; identical to SEQ ID NO: 661
  Description of Artificial Sequence: Synthetic polynucleotide

SEQ ID NO: 684 - protein, 87 aa, Artificial Sequence; identical to SEQ ID NO: 431
  Description of Artificial Sequence: Synthetic polypeptide

SEQ ID NO: 685 - DNA, 6 bp, Artificial Sequence
  Description of Artificial Sequence: Synthetic oligonucleotide
atgcat

SEQ ID NO: 686 - protein, 2 aa, Artificial Sequence
  Description of Artificial Sequence: Synthetic peptide
MH

SEQ ID NO: 687 - DNA, 261 bp, Artificial Sequence; identical to SEQ ID NO: 430
  Description of Artificial Sequence: Synthetic polynucleotide

SEQ ID NO: 688 - protein, 87 aa, Artificial Sequence; identical to SEQ ID NO: 431
  Description of Artificial Sequence: Synthetic polypeptide

SEQ ID NO: 689 - DNA, 30 bp, Artificial Sequence; identical to SEQ ID NO: 663
  Description of Artificial Sequence: Synthetic oligonucleotide

SEQ ID NO: 690 - protein, 10 aa, Artificial Sequence
  Description of Artificial Sequence: Synthetic peptide
MHSGGGSGVE

SEQ ID NO: 691 - DNA, 513 bp, Artificial Sequence; identical to SEQ ID NO: 665
  Description of Artificial Sequence: Synthetic polynucleotide

SEQ ID NO: 692 - protein, 171 aa, Artificial Sequence; identical to SEQ ID NO: 214
  Description of Artificial Sequence: Synthetic polypeptide

SEQ ID NO: 693 - DNA, 6 bp, Artificial Sequence
  Description of Artificial Sequence: Synthetic oligonucleotide
gttgag

SEQ ID NO: 694 - protein, 2 aa, Artificial Sequence
  Description of Artificial Sequence: Synthetic peptide
VE

SEQ ID NO: 695 - DNA, 186 bp, Artificial Sequence; identical to SEQ ID NO: 669
  Description of Artificial Sequence: Synthetic polynucleotide

SEQ ID NO: 696 - protein, 62 aa, Artificial Sequence; identical to SEQ ID NO: 216
  Description of Artificial Sequence: Synthetic polypeptide

SEQ ID NO: 697 - DNA, 6 bp, Artificial Sequence
  Description of Artificial Sequence: Synthetic oligonucleotide
gtcgac

SEQ ID NO: 698 - protein, 2 aa, Artificial Sequence
  Description of Artificial Sequence: Synthetic peptide
VD

SEQ ID NO: 699 - DNA, 27 bp, Artificial Sequence
  Description of Artificial Sequence: Synthetic oligonucleotide
tacccatacgacgtgccagattatgct

SEQ ID NO: 700 - protein, 9 aa, Artificial Sequence
  Description of Artificial Sequence: Synthetic peptide
YPYDVPDYA

SEQ ID NO: 701 - DNA, 6 bp, Artificial Sequence
  Description of Artificial Sequence: Synthetic oligonucleotide
ccgcgg

SEQ ID NO: 702 - protein, 2 aa, Artificial Sequence
  Description of Artificial Sequence: Synthetic peptide
PR

SEQ ID NO: 703 - DNA, 54 bp, Artificial Sequence; identical to SEQ ID NO: 138
  Description of Artificial Sequence: Synthetic oligonucleotide

SEQ ID NO: 704 - protein, 18 aa, Artificial Sequence
  Description of Artificial Sequence: Synthetic peptide
EGRGSLLTCGDVEENPGP

SEQ ID NO: 705 - DNA, 1002 bp, Artificial Sequence; identical to SEQ ID NO: 309
  Description of Artificial Sequence: Synthetic polynucleotide

SEQ ID NO: 706 - protein, 333 aa, Artificial Sequence; identical to SEQ ID NO: 15
  Description of Artificial Sequence: Synthetic polypeptide

SEQ ID NO: 707 - DNA, 63 bp, Artificial Sequence; identical to SEQ ID NO: 142
  Description of Artificial Sequence: Synthetic oligonucleotide

SEQ ID NO: 708 - protein, 21 aa, Artificial Sequence
  Description of Artificial Sequence: Synthetic peptide
MEFGLSWLFLVAILKGVQCSR

SEQ ID NO: 709 - DNA, 327 bp, Artificial Sequence; identical to SEQ ID NO: 164
  Description of Artificial Sequence: Synthetic polynucleotide

SEQ ID NO: 710 - protein, 109 aa, Artificial Sequence; identical to SEQ ID NO: 165
  Description of Artificial Sequence: Synthetic polypeptide

SEQ ID NO: 711 - DNA, 24 bp, Artificial Sequence
  Description of Artificial Sequence: Synthetic oligonucleotide
ggcggaggaagcggaggtgggggc

SEQ ID NO: 712 - protein, 8 aa, Artificial Sequence
  Description of Artificial Sequence: Synthetic peptide
GGGSGGGG

SEQ ID NO: 713 - DNA, 357 bp, Artificial Sequence; identical to SEQ ID NO: 168
  Description of Artificial Sequence: Synthetic polynucleotide

SEQ ID NO: 714 - protein, 119 aa, Artificial Sequence; identical to SEQ ID NO: 169
  Description of Artificial Sequence: Synthetic polypeptide

SEQ ID NO: 715 - DNA, 6 bp, Artificial Sequence
  Description of Artificial Sequence: Synthetic oligonucleotide
ggatcc

SEQ ID NO: 716 - protein, 2 aa, Artificial Sequence
  Description of Artificial Sequence: Synthetic peptide
GS

SEQ ID NO: 717 - DNA, 48 bp, Artificial Sequence; identical to SEQ ID NO: 152
  Description of Artificial Sequence: Synthetic oligonucleotide

SEQ ID NO: 718 - protein, 16 aa, Artificial Sequence
  Description of Artificial Sequence: Synthetic peptide
ELPTQGTFSNVSTNVS

SEQ ID NO: 719 - DNA, 126 bp, Artificial Sequence; identical to SEQ ID NO: 154
  Description of Artificial Sequence: Synthetic polynucleotide

SEQ ID NO: 720 - protein, 42 aa, Artificial Sequence; identical to SEQ ID NO: 155
  Description of Artificial Sequence: Synthetic polypeptide

SEQ ID NO: 721 - DNA, 111 bp, Artificial Sequence; identical to SEQ ID NO: 156
  Description of Artificial Sequence: Synthetic polynucleotide

SEQ ID NO: 722 - protein, 37 aa, Artificial Sequence; identical to SEQ ID NO: 157
  Description of Artificial Sequence: Synthetic polypeptide

SEQ ID NO: 723 - DNA, 6 bp, Artificial Sequence
  Description of Artificial Sequence: Synthetic oligonucleotide
ctcgag

SEQ ID NO: 724 - protein, 2 aa, Artificial Sequence
  Description of Artificial Sequence: Synthetic peptide
LE

SEQ ID NO: 725 - DNA, 335 bp, Artificial Sequence
  Description of Artificial Sequence: Synthetic polynucleotide
agagtgaagttcagcaggagcgcagacgcccccgcgtaccagcagggccagaaccagctctataacgagctcaatctaggacgaagagaggagtacgatgttttggacaagagacgtggccgggaccctgagatggggggaaagccgagaaggaagaaccctcaggaaggcctgtacaatgaactgcagaaagataagatggcggaggcctacagtgagattgggatgaaaggcgagcgccggaggggcaaggggcacgatggcctttaccagggtctcagtacagccaccaaggacacctacgacgcccttcacatgcaagctcttccacctcg

SEQ ID NO: 726 - protein, 111 aa, Artificial Sequence
  Description of Artificial Sequence: Synthetic polypeptide
RVKFSRSADAPAYQQGQNQLYNELNLGRREEYDVLDKRRGRDPEMGGKPRRKNPQEGLYNELQKDKMAEAYSEIGMKGERRRGKGHDGLYQGLSTATKDTYDALHMQALPP

SEQ ID NO: 727 - DNA, 24 bp, Artificial Sequence
  Description of Artificial Sequence: Synthetic oligonucleotide
tcaggcggtggctcaggtgttaac

SEQ ID NO: 728 - protein, 8 aa, Artificial Sequence
  Description of Artificial Sequence: Synthetic peptide
SGGGSGVN

SEQ ID NO: 729 - DNA, 321 bp, Artificial Sequence; identical to SEQ ID NO: 573
  Description of Artificial Sequence: Synthetic polynucleotide

SEQ ID NO: 730 - protein, 107 aa, Artificial Sequence; identical to SEQ ID NO: 532
  Description of Artificial Sequence: Synthetic polypeptide

SEQ ID NO: 731 - DNA, 6 bp, Artificial Sequence
  Description of Artificial Sequence: Synthetic oligonucleotide
gttaac

SEQ ID NO: 732 - protein, 2 aa, Artificial Sequence
  Description of Artificial Sequence: Synthetic peptide
VN

SEQ ID NO: 733 - DNA, 321 bp, Artificial Sequence; identical to SEQ ID NO: 577
  Description of Artificial Sequence: Synthetic polynucleotide

SEQ ID NO: 734 - protein, 107 aa, Artificial Sequence; identical to SEQ ID NO: 532
  Description of Artificial Sequence: Synthetic polypeptide

SEQ ID NO: 735 - DNA, 9 bp, Artificial Sequence
  Description of Artificial Sequence: Synthetic oligonucleotide
ggatcggga

SEQ ID NO: 736 - protein, 3 aa, Artificial Sequence
  Description of Artificial Sequence: Synthetic peptide
GSG

SEQ ID NO: 737 - DNA, 57 bp, Artificial Sequence
  Description of Artificial Sequence: Synthetic oligonucleotide
gctactaacttcagcctgctgaagcaggctggagacgtggaggagaaccccgggcct

SEQ ID NO: 738 - protein, 19 aa, Artificial Sequence
  Description of Artificial Sequence: Synthetic peptide
ATNFSLLKQAGDVEENPGP

SEQ ID NO: 739 - DNA, 261 bp, Artificial Sequence; identical to SEQ ID NO: 547
  Description of Artificial Sequence: Synthetic polynucleotide

SEQ ID NO: 740 - protein, 87 aa, Artificial Sequence; identical to SEQ ID NO: 431
  Description of Artificial Sequence: Synthetic polypeptide

SEQ ID NO: 741 - DNA, 6 bp, Artificial Sequence
  Description of Artificial Sequence: Synthetic oligonucleotide
gtcgag

SEQ ID NO: 742 - protein, 2 aa, Artificial Sequence
  Description of Artificial Sequence: Synthetic peptide
VE

SEQ ID NO: 743 - DNA, 261 bp, Artificial Sequence; identical to SEQ ID NO: 531
  Description of Artificial Sequence: Synthetic polynucleotide

SEQ ID NO: 744 - protein, 87 aa, Artificial Sequence; identical to SEQ ID NO: 431
  Description of Artificial Sequence: Synthetic polypeptide

SEQ ID NO: 745 - DNA, 18 bp, Artificial Sequence
  Description of Artificial Sequence: Synthetic oligonucleotide
tcaggcggtggctcaggt

SEQ ID NO: 746 - protein, 6 aa, Artificial Sequence
  Description of Artificial Sequence: Synthetic peptide
SGGGSG

SEQ ID NO: 747 - DNA, 921 bp, Artificial Sequence; identical to SEQ ID NO: 523
  Description of Artificial Sequence: Synthetic polynucleotide

SEQ ID NO: 748 - protein, 306 aa, Artificial Sequence
  Description of Artificial Sequence: Synthetic polypeptide
VDGFGDVGALESLRGNADLAYILSMEPCGHCLIINNVNFCRESGLRTRTGSNIDCEKLRRRFSSLHFMVEVKGDLTAKKMVLALLELARQDHGALDCCVVVILSHGCQASHLQFPGAVYGTDGCPVSVEKIVNIFNGTSCPSLGGKPKLFFIQACGGEQKDHGFEVASTSPEDESPGSNPEPDATPFQEGLRTFDQLDAISSLPTPSDIFVSYSTFPGFVSWRDPKSGSWYVETLDDIFEQWAHSEDLQSLLLRVANAVSVKGIYKQMPGCFNFLRKKLFFKTSASRAEGRGSLLTCGDVEENPGP

SEQ ID NO: 749 - DNA, 516 bp, Artificial Sequence; identical to SEQ ID NO: 251
  Description of Artificial Sequence: Synthetic polynucleotide

SEQ ID NO: 750 - protein, 172 aa, Artificial Sequence; identical to SEQ ID NO: 240
  Description of Artificial Sequence: Synthetic polypeptide

SEQ ID NO: 751 - DNA, 6 bp, Artificial Sequence
  Description of Artificial Sequence: Synthetic oligonucleotide
gtcgag

SEQ ID NO: 752 - protein, 2 aa, Artificial Sequence
  Description of Artificial Sequence: Synthetic peptide
VG

SEQ ID NO: 753 - DNA, 186 bp, Artificial Sequence; identical to SEQ ID NO: 255
  Description of Artificial Sequence: Synthetic polynucleotide

SEQ ID NO: 754 - protein, 62 aa, Artificial Sequence; identical to SEQ ID NO: 216
  Description of Artificial Sequence: Synthetic polypeptide

SEQ ID NO: 755 - DNA, 6 bp, Artificial Sequence
  Description of Artificial Sequence: Synthetic oligonucleotide
gtcgag

SEQ ID NO: 756 - protein, 2 aa, Artificial Sequence
  Description of Artificial Sequence: Synthetic peptide
VG

SEQ ID NO: 757 - DNA, 321 bp, Artificial Sequence
  Description of Artificial Sequence: Synthetic polynucleotide
ggcgtccaagtcgaaaccattagtcccggcgatggcagaacatttcctaaaaggggacaaacatgtgtcgtccattatacaggcatgttggaggacggcaaaaaggtggacagtagtagagatcgcaataaacctttcaaattcatgttgggaaaacaagaagtcattaggggatgggaggagggcgtggctcaaatgtccgtcggccaacgcgctaagctcaccatcagccccgactacgcatacggcgctaccggacatcccggaattattccccctcacgctaccttggtgtttgacgtcgaactgttgaagctcgaa

SEQ ID NO: 758 - protein, 107 aa, Artificial Sequence; identical to SEQ ID NO: 3
  Description of Artificial Sequence: Synthetic polypeptide

SEQ ID NO: 759 - DNA, 6 bp, Artificial Sequence
  Description of Artificial Sequence: Synthetic oligonucleotide
gtcgag

SEQ ID NO: 760 - protein, 2 aa, Artificial Sequence
  Description of Artificial Sequence: Synthetic peptide
VG

SEQ ID NO: 761 - DNA, 321 bp, Artificial Sequence
  Description of Artificial Sequence: Synthetic polynucleotide
ggagtgcaggtggagactatctccccaggagacgggcgcaccttccccaagcgcggccagacctgcgtggtgcactacaccgggatgcttgaagatggaaagaaagttgattcctcccgggacagaaacaagccctttaagtttatgctaggcaagcaggaggtgatccgaggctgggaagaaggggttgcccagatgagtgtgggtcagagagccaaactgactatatctccagattatgcctatggtgccactgggcacccaggcatcatcccaccacatgccactctcgtcttcgatgtggagcttctaaaactggaa

SEQ ID NO: 762 - protein, 107 aa, Artificial Sequence; identical to SEQ ID NO: 3
  Description of Artificial Sequence: Synthetic polypeptide

SEQ ID NO: 763 - DNA, 6 bp, Artificial Sequence
  Description of Artificial Sequence: Synthetic oligonucleotide
ccgcgg

SEQ ID NO: 764 - protein, 2 aa, Artificial Sequence
  Description of Artificial Sequence: Synthetic peptide
PR

SEQ ID NO: 765 - DNA, 54 bp, Artificial Sequence; identical to SEQ ID NO: 138
  Description of Artificial Sequence: Synthetic oligonucleotide

SEQ ID NO: 766 - protein, 18 aa, Artificial Sequence
  Description of Artificial Sequence: Synthetic peptide
EGRGSLLTCGDVEENPGP

SEQ ID NO: 767 - DNA, 1002 bp, Artificial Sequence; identical to SEQ ID NO: 309
  Description of Artificial Sequence: Synthetic polynucleotide

SEQ ID NO: 768 - protein, 333 aa, Artificial Sequence; identical to SEQ ID NO: 15
  Description of Artificial Sequence: Synthetic polypeptide

SEQ ID NO: 769 - DNA, 42 bp, Artificial Sequence; identical to SEQ ID NO: 247
  Description of Artificial Sequence: Synthetic oligonucleotide

SEQ ID NO: 770 - protein, 14 aa, Artificial Sequence
  Description of Artificial Sequence: Synthetic peptide
MGSSKSKPKDPSQR

SEQ ID NO: 771 - DNA, 6 bp, Artificial Sequence
  Description of Artificial Sequence: Synthetic oligonucleotide
ctcgac

SEQ ID NO: 772 - protein, 2 aa, Artificial Sequence
  Description of Artificial Sequence: Synthetic peptide
LN

SEQ ID NO: 773 - DNA, 516 bp, Artificial Sequence; identical to SEQ ID NO: 251
  Description of Artificial Sequence: Synthetic polynucleotide

SEQ ID NO: 774 - protein, 172 aa, Artificial Sequence; identical to SEQ ID NO: 240
  Description of Artificial Sequence: Synthetic polypeptide

SEQ ID NO: 775 - DNA, 6 bp, Artificial Sequence
  Description of Artificial Sequence: Synthetic oligonucleotide
gtcgag

SEQ ID NO: 776 - protein, 2 aa, Artificial Sequence
  Description of Artificial Sequence: Synthetic peptide
VG

SEQ ID NO: 777 - DNA, 186 bp, Artificial Sequence; identical to SEQ ID NO: 255
  Description of Artificial Sequence: Synthetic polynucleotide

SEQ ID NO: 778 - protein, 62 aa, Artificial Sequence; identical to SEQ ID NO: 216
  Description of Artificial Sequence: Synthetic polypeptide

SEQ ID NO: 779 - DNA, 6 bp, Artificial Sequence
  Description of Artificial Sequence: Synthetic oligonucleotide
gtcgag

SEQ ID NO: 780 - protein, 2 aa, Artificial Sequence
  Description of Artificial Sequence: Synthetic peptide
VG

SEQ ID NO: 781 - DNA, 321 bp, Artificial Sequence; identical to SEQ ID NO: 757
  Description of Artificial Sequence: Synthetic polynucleotide

SEQ ID NO: 782 - protein, 107 aa, Artificial Sequence; identical to SEQ ID NO: 3
  Description of Artificial Sequence: Synthetic polypeptide

SEQ ID NO: 783 - DNA, 6 bp, Artificial Sequence
  Description of Artificial Sequence: Synthetic oligonucleotide
gtcgag

SEQ ID NO: 784 - protein, 2 aa, Artificial Sequence
  Description of Artificial Sequence: Synthetic peptide
VG

SEQ ID NO: 785 - DNA, 321 bp, Artificial Sequence; identical to SEQ ID NO: 761
  Description of Artificial Sequence: Synthetic polynucleotide

SEQ ID NO: 786 - protein, 107 aa, Artificial Sequence; identical to SEQ ID NO: 3
  Description of Artificial Sequence: Synthetic polypeptide

SEQ ID NO: 787 - DNA, 6 bp, Artificial Sequence
  Description of Artificial Sequence: Synthetic oligonucleotide
ccgcgg

SEQ ID NO: 788 - protein, 2 aa, Artificial Sequence
  Description of Artificial Sequence: Synthetic peptide
PR

SEQ ID NO: 789 - DNA, 54 bp, Artificial Sequence; identical to SEQ ID NO: 138
  Description of Artificial Sequence: Synthetic oligonucleotide

SEQ ID NO: 790 - protein, 18 aa, Artificial Sequence
  Description of Artificial Sequence: Synthetic peptide
EGRGSLLTCGDVEENPGP

SEQ ID NO: 791 - DNA, 1002 bp, Artificial Sequence; identical to SEQ ID NO: 309
  Description of Artificial Sequence: Synthetic polynucleotide

SEQ ID NO: 792 - protein, 333 aa, Artificial Sequence; identical to SEQ ID NO: 15
  Description of Artificial Sequence: Synthetic polypeptide

SEQ ID NO: 793 - DNA, 261 bp, Artificial Sequence; identical to SEQ ID NO: 547
  Description of Artificial Sequence: Synthetic polynucleotide

SEQ ID NO: 794 - protein, 87 aa, Artificial Sequence; identical to SEQ ID NO: 431
  Description of Artificial Sequence: Synthetic polypeptide

SEQ ID NO: 795 - DNA, 6 bp, Artificial Sequence
  Description of Artificial Sequence: Synthetic oligonucleotide
gtcgag

SEQ ID NO: 796 - protein, 2 aa, Artificial Sequence
  Description of Artificial Sequence: Synthetic peptide
VG

SEQ ID NO: 797 - DNA, 261 bp, Artificial Sequence; identical to SEQ ID NO: 531
  Description of Artificial Sequence: Synthetic polynucleotide

SEQ ID NO: 798 - protein, 87 aa, Artificial Sequence; identical to SEQ ID NO: 431
  Description of Artificial Sequence: Synthetic polypeptide

SEQ ID NO: 799 - DNA, 18 bp, Artificial Sequence
  Description of Artificial Sequence: Synthetic oligonucleotide
tcaggcggtggctcaggt

SEQ ID NO: 800 - protein, 6 aa, Artificial Sequence
  Description of Artificial Sequence: Synthetic peptide
SGGGSG

SEQ ID NO: 801 - DNA, 863 bp, Artificial Sequence
  Description of Artificial Sequence: Synthetic polynucleotide
tcgacggatttggtgatgtcggtgctcttgagagtttgaggggaaatgcagatttggcttacatcctgagcatggagccctgtggccactgcctcattatcaacaatgtgaacttctgccgtgagtccgggctccgcacccgcactggctccaacatcgactgtgagaagttgcggcgtcgcttctcctcgctgcatttcatggtggaggtgaagggcgacctgactgccaagaaaatggtgctggctttgctggagctggcgcggcaggaccacggtgctctggactgctgcgtggtggtcattctctctcacggctgtcaggccagccacctgcagttcccaggggctgtctacggcacagatggatgccctgtgtcggtcgagaagattgtgaacatcttcaatgggaccagctgccccagcctgggagggaagcccaagctctttttcatccaggcctgtggtggggagcagaaagaccatgggtttgaggtggcctccacttcccctgaagacgagtcccctggcagtaaccccgagccagatgccaccccgttccaggaaggtttgaggaccttcgaccagctggacgccatatctagtttgcccacacccagtgacatctttgtgtcctactctactttcccaggttttgtttcctggagggaccccaagagtggctcctggtacgttgagaccctggacgacatctttgagcagtgggctcactctgaagacctgcagtccctcctgcttagggtcgctaatgctgtttcggtgaaagggatttataaacagatgcctggttgctttaatttcctccggaaaaaacttttctttaaaacatcagctagcagagcc

SEQ ID NO: 802 - protein, 287 aa, Artificial Sequence; identical to SEQ ID NO: 536
  Description of Artificial Sequence: Synthetic polypeptide

SEQ ID NO: 803 - DNA, 6 bp, Artificial Sequence
  Description of Artificial Sequence: Synthetic oligonucleotide
ccgcgg

SEQ ID NO: 804 - protein, 2 aa, Artificial Sequence
  Description of Artificial Sequence: Synthetic peptide
PR

SEQ ID NO: 805 - DNA, 54 bp, Artificial Sequence; identical to SEQ ID NO: 138
  Description of Artificial Sequence: Synthetic oligonucleotide

SEQ ID NO: 806 - protein, 18 aa, Artificial Sequence
  Description of Artificial Sequence: Synthetic peptide
EGRGSLLTCGDVEENPGP

SEQ ID NO: 807 - DNA, 63 bp, Artificial Sequence
  Description of Artificial Sequence: Synthetic oligonucleotide
atggaatttggcctctcctggttgtttctcgtggccattcttaagggtgtgcagtgctccaga

SEQ ID NO: 808 - protein, 21 aa, Artificial Sequence
  Description of Artificial Sequence: Synthetic peptide
MEFGLSWLFLVAILKGVQCSR

SEQ ID NO: 809 - DNA, 6 bp, Artificial Sequence
  Description of Artificial Sequence: Synthetic oligonucleotide
atgcat

SEQ ID NO: 810 - protein, 2 aa, Artificial Sequence
  Description of Artificial Sequence: Synthetic peptide
MH

SEQ ID NO: 811 - DNA, 48 bp, Artificial Sequence; identical to SEQ ID NO: 152
  Description of Artificial Sequence: Synthetic oligonucleotide

SEQ ID NO: 812 - protein, 16 aa, Artificial Sequence
  Description of Artificial Sequence: Synthetic peptide
ELPTQGTFSNVSTNVS

SEQ ID NO: 813 - DNA, 126 bp, Artificial Sequence; identical to SEQ ID NO: 154
  Description of Artificial Sequence: Synthetic polynucleotide

SEQ ID NO: 814 - protein, 42 aa, Artificial Sequence; identical to SEQ ID NO: 155
  Description of Artificial Sequence: Synthetic polypeptide

SEQ ID NO: 815 - DNA, 117 bp, Artificial Sequence
  Description of Artificial Sequence: Synthetic polynucleotide
atctatatctgggcacctctcgctggcacctgtggagtccttctgctcagcctggttattactctgtactgtaatcaccggaatcgccgccgcgtttgtaagtgtcccagggtcgac

SEQ ID NO: 816 - protein, 39 aa, Artificial Sequence
  Description of Artificial Sequence: Synthetic polypeptide
IYIWAPLAGTCGVLLLSLVITLYCNHRNRRRVCKCPRVD

SEQ ID NO: 817 - DNA, 335 bp, Artificial Sequence; identical to SEQ ID NO: 725
  Description of Artificial Sequence: Synthetic polynucleotide

SEQ ID NO: 818 - protein, 111 aa, Artificial Sequence; identical to SEQ ID NO: 726
  Description of Artificial Sequence: Synthetic polypeptide

SEQ ID NO: 819 - DNA, 516 bp, Artificial Sequence; identical to SEQ ID NO: 251
  Description of Artificial Sequence: Synthetic polynucleotide

SEQ ID NO: 820 - protein, 172 aa, Artificial Sequence; identical to SEQ ID NO: 240
  Description of Artificial Sequence: Synthetic polypeptide

SEQ ID NO: 821 - DNA, 6 bp, Artificial Sequence
  Description of Artificial Sequence: Synthetic oligonucleotide
gtcgag

SEQ ID NO: 822 - protein, 2 aa, Artificial Sequence
  Description of Artificial Sequence: Synthetic peptide
VE

SEQ ID NO: 823 - DNA, 186 bp, Artificial Sequence; identical to SEQ ID NO: 255
  Description of Artificial Sequence: Synthetic polynucleotide

SEQ ID NO: 824 - protein, 62 aa, Artificial Sequence; identical to SEQ ID NO: 216
  Description of Artificial Sequence: Synthetic polypeptide

SEQ ID NO: 825 - DNA, 6 bp, Artificial Sequence
  Description of Artificial Sequence: Synthetic oligonucleotide
gtcgag

SEQ ID NO: 826 - protein, 2 aa, Artificial Sequence
  Description of Artificial Sequence: Synthetic peptide
VE

SEQ ID NO: 827 - DNA, 321 bp, Artificial Sequence; identical to SEQ ID NO: 757
  Description of Artificial Sequence: Synthetic polynucleotide

SEQ ID NO: 828 - protein, 107 aa, Artificial Sequence; identical to SEQ ID NO: 3
  Description of Artificial Sequence: Synthetic polypeptide

SEQ ID NO: 829 - DNA, 6 bp, Artificial Sequence
  Description of Artificial Sequence: Synthetic oligonucleotide
gtcgag

SEQ ID NO: 830 - protein, 2 aa, Artificial Sequence
  Description of Artificial Sequence: Synthetic peptide
VE

SEQ ID NO: 831 - DNA, 321 bp, Artificial Sequence; identical to SEQ ID NO: 761
  Description of Artificial Sequence: Synthetic polynucleotide

SEQ ID NO: 832 - protein, 107 aa, Artificial Sequence; identical to SEQ ID NO: 3
  Description of Artificial Sequence: Synthetic polypeptide

SEQ ID NO: 833 - DNA, 6 bp, Artificial Sequence
  Description of Artificial Sequence: Synthetic oligonucleotide
ccgcgg

SEQ ID NO: 834 - protein, 2 aa, Artificial Sequence
  Description of Artificial Sequence: Synthetic peptide
PR

SEQ ID NO: 835 - DNA, 54 bp, Artificial Sequence; identical to SEQ ID NO: 138
  Description of Artificial Sequence: Synthetic oligonucleotide

SEQ ID NO: 836 - protein, 18 aa, Artificial Sequence
  Description of Artificial Sequence: Synthetic peptide
EGRGSLLTCGDVEENPGP

SEQ ID NO: 837 - DNA, 6 bp, Artificial Sequence
  Description of Artificial Sequence: Synthetic oligonucleotide
ccatgg

SEQ ID NO: 838 - protein, 2 aa, Artificial Sequence
  Description of Artificial Sequence: Synthetic peptide
PW

SEQ ID NO: 839 - DNA, 63 bp, Artificial Sequence; identical to SEQ ID NO: 142
  Description of Artificial Sequence: Synthetic oligonucleotide

SEQ ID NO: 840 - protein, 21 aa, Artificial Sequence
  Description of Artificial Sequence: Synthetic peptide
MEFGLSWLFLVAILKGVQCSR

SEQ ID NO: 841 - DNA, 321 bp, Artificial Sequence; identical to SEQ ID NO: 144
  Description of Artificial Sequence: Synthetic polynucleotide

SEQ ID NO: 842 - protein, 107 aa, Artificial Sequence; identical to SEQ ID NO: 145
  Description of Artificial Sequence: Synthetic polypeptide

SEQ ID NO: 843 - DNA, 24 bp, Artificial Sequence
  Description of Artificial Sequence: Synthetic oligonucleotide
ggcggaggaagcggaggtgggggc

SEQ ID NO: 844 - protein, 8 aa, Artificial Sequence
  Description of Artificial Sequence: Synthetic peptide
GGGSGGGG

SEQ ID NO: 845 - DNA, 360 bp, Artificial Sequence; identical to SEQ ID NO: 148
  Description of Artificial Sequence: Synthetic polynucleotide

SEQ ID NO: 846 - protein, 120 aa, Artificial Sequence; identical to SEQ ID NO: 149
  Description of Artificial Sequence: Synthetic polypeptide

SEQ ID NO: 847 - DNA, 6 bp, Artificial Sequence
  Description of Artificial Sequence: Synthetic oligonucleotide
ggatcc

SEQ ID NO: 848 - protein, 2 aa, Artificial Sequence
  Description of Artificial Sequence: Synthetic peptide
GS

SEQ ID NO: 849 - DNA, 48 bp, Artificial Sequence; identical to SEQ ID NO: 152
  Description of Artificial Sequence: Synthetic oligonucleotide

SEQ ID NO: 850 - protein, 16 aa, Artificial Sequence
  Description of Artificial Sequence: Synthetic peptide
ELPTQGTFSNVSTNVS

SEQ ID NO: 851 - DNA, 126 bp, Artificial Sequence; identical to SEQ ID NO: 154
  Description of Artificial Sequence: Synthetic polynucleotide

SEQ ID NO: 852 - protein, 42 aa, Artificial Sequence; identical to SEQ ID NO: 155
  Description of Artificial Sequence: Synthetic polypeptide

SEQ ID NO: 853 - DNA, 111 bp, Artificial Sequence; identical to SEQ ID NO: 156
  Description of Artificial Sequence: Synthetic polynucleotide

SEQ ID NO: 854 - protein, 37 aa, Artificial Sequence; identical to SEQ ID NO: 157
  Description of Artificial Sequence: Synthetic polypeptide

SEQ ID NO: 855 - DNA, 6 bp, Artificial Sequence
  Description of Artificial Sequence: Synthetic oligonucleotide
gtcgac

SEQ ID NO: 856 - protein, 2 aa, Artificial Sequence
  Description of Artificial Sequence: Synthetic peptide
VD

SEQ ID NO: 857 - DNA, 335 bp, Artificial Sequence; identical to SEQ ID NO: 725
  Description of Artificial Sequence: Synthetic polynucleotide

SEQ ID NO: 858 - protein, 111 aa, Artificial Sequence; identical to SEQ ID NO: 726
  Description of Artificial Sequence: Synthetic polypeptide

SEQ ID NO: 859 - DNA, 42 bp, Artificial Sequence; identical to SEQ ID NO: 247
  Description of Artificial Sequence: Synthetic oligonucleotide

SEQ ID NO: 860 - protein, 14 aa, Artificial Sequence
  Description of Artificial Sequence: Synthetic peptide
MGSSKSKPKDPSQR

SEQ ID NO: 861 - DNA, 6 bp, Artificial Sequence
  Description of Artificial Sequence: Synthetic oligonucleotide
ctcgac

SEQ ID NO: 862 - protein, 2 aa, Artificial Sequence
  Description of Artificial Sequence: Synthetic peptide
LD

SEQ ID NO: 863 - DNA, 516 bp, Artificial Sequence; identical to SEQ ID NO: 251
  Description of Artificial Sequence: Synthetic polynucleotide

SEQ ID NO: 864 - protein, 172 aa, Artificial Sequence; identical to SEQ ID NO: 240
  Description of Artificial Sequence: Synthetic polypeptide

SEQ ID NO: 865 - DNA, 6 bp, Artificial Sequence
  Description of Artificial Sequence: Synthetic oligonucleotide
gtcgag

SEQ ID NO: 866 - protein, 2 aa, Artificial Sequence
  Description of Artificial Sequence: Synthetic peptide
VE

SEQ ID NO: 867 - DNA, 186 bp, Artificial Sequence; identical to SEQ ID NO: 255
  Description of Artificial Sequence: Synthetic polynucleotide

SEQ ID NO: 868 - protein, 62 aa, Artificial Sequence; identical to SEQ ID NO: 216
  Description of Artificial Sequence: Synthetic polypeptide

SEQ ID NO: 869 - DNA, 6 bp, Artificial Sequence
  Description of Artificial Sequence: Synthetic oligonucleotide
gtcgag

SEQ ID NO: 870 - protein, 2 aa, Artificial Sequence
  Description of Artificial Sequence: Synthetic peptide
VE

SEQ ID NO: 871 - DNA, 321 bp, Artificial Sequence; identical to SEQ ID NO: 757
  Description of Artificial Sequence: Synthetic polynucleotide

SEQ ID NO: 872 - protein, 107 aa, Artificial Sequence; identical to SEQ ID NO: 3
  Description of Artificial Sequence: Synthetic polypeptide

SEQ ID NO: 873 - DNA, 6 bp, Artificial Sequence
  Description of Artificial Sequence: Synthetic oligonucleotide
gtcgag

SEQ ID NO: 874 - protein, 2 aa, Artificial Sequence
  Description of Artificial Sequence: Synthetic peptide
VE

SEQ ID NO: 875 - DNA, 321 bp, Artificial Sequence; identical to SEQ ID NO: 761
  Description of Artificial Sequence: Synthetic polynucleotide

SEQ ID NO: 876 - protein, 107 aa, Artificial Sequence; identical to SEQ ID NO: 3
  Description of Artificial Sequence: Synthetic polypeptide

SEQ ID NO: 877 - DNA, 6 bp, Artificial Sequence
  Description of Artificial Sequence: Synthetic oligonucleotide
ccgcgg

SEQ ID NO: 878 - protein, 2 aa, Artificial Sequence
  Description of Artificial Sequence: Synthetic peptide
PR

SEQ ID NO: 879 - DNA, 54 bp, Artificial Sequence; identical to SEQ ID NO: 138
  Description of Artificial Sequence: Synthetic oligonucleotide

SEQ ID NO: 880 - protein, 18 aa, Artificial Sequence
  Description of Artificial Sequence: Synthetic peptide
EGRGSLLTCGDVEENPGP

SEQ ID NO: 881 - DNA, 6 bp, Artificial Sequence
  Description of Artificial Sequence: Synthetic oligonucleotide
ccatgg

SEQ ID NO: 882 - protein, 2 aa, Artificial Sequence
  Description of Artificial Sequence: Synthetic peptide
PW

SEQ ID NO: 883 - DNA, 63 bp, Artificial Sequence; identical to SEQ ID NO: 142
  Description of Artificial Sequence: Synthetic oligonucleotide

SEQ ID NO: 884 - protein, 21 aa, Artificial Sequence
  Description of Artificial Sequence: Synthetic peptide
MEFGLSWLFLVAILKGVQCSR

SEQ ID NO: 885 - DNA, 321 bp, Artificial Sequence; identical to SEQ ID NO: 144
  Description of Artificial Sequence: Synthetic polynucleotide

SEQ ID NO: 886 - protein, 107 aa, Artificial Sequence; identical to SEQ ID NO: 145
  Description of Artificial Sequence: Synthetic polypeptide

SEQ ID NO: 887 - DNA, 24 bp, Artificial Sequence
  Description of Artificial Sequence: Synthetic oligonucleotide
ggcggaggaagcggaggtgggggc

SEQ ID NO: 888 - protein, 8 aa, Artificial Sequence
  Description of Artificial Sequence: Synthetic peptide
GGGSGGGG

SEQ ID NO: 889 - DNA, 360 bp, Artificial Sequence; identical to SEQ ID NO: 148
  Description of Artificial Sequence: Synthetic polynucleotide

SEQ ID NO: 890 - protein, 120 aa, Artificial Sequence; identical to SEQ ID NO: 149
  Description of Artificial Sequence: Synthetic polypeptide

SEQ ID NO: 891 - DNA, 6 bp, Artificial Sequence
  Description of Artificial Sequence: Synthetic oligonucleotide
ggatcc

SEQ ID NO: 892 - protein, 2 aa, Artificial Sequence
  Description of Artificial Sequence: Synthetic peptide
GS

SEQ ID NO: 893 - DNA, 48 bp, Artificial Sequence; identical to SEQ ID NO: 152
  Description of Artificial Sequence: Synthetic oligonucleotide

SEQ ID NO: 894 - protein, 16 aa, Artificial Sequence
  Description of Artificial Sequence: Synthetic peptide
ELPTQGTFSNVSTNVS

SEQ ID NO: 895 - DNA, 126 bp, Artificial Sequence; identical to SEQ ID NO: 154
  Description of Artificial Sequence: Synthetic polynucleotide

SEQ ID NO: 896 - protein, 42 aa, Artificial Sequence; identical to SEQ ID NO: 155
  Description of Artificial Sequence: Synthetic polypeptide

SEQ ID NO: 897 - DNA, 111 bp, Artificial Sequence; identical to SEQ ID NO: 156
  Description of Artificial Sequence: Synthetic polynucleotide

SEQ ID NO: 898 - protein, 37 aa, Artificial Sequence; identical to SEQ ID NO: 157
  Description of Artificial Sequence: Synthetic polypeptide

SEQ ID NO: 899 - DNA, 6 bp, Artificial Sequence
  Description of Artificial Sequence: Synthetic oligonucleotide
gtcgac

SEQ ID NO: 900 - protein, 2 aa, Artificial Sequence
  Description of Artificial Sequence: Synthetic peptide
VD

SEQ ID NO: 901 - DNA, 335 bp, Artificial Sequence; identical to SEQ ID NO: 725
  Description of Artificial Sequence: Synthetic polynucleotide

SEQ ID NO: 902 - protein, 111 aa, Artificial Sequence; identical to SEQ ID NO: 726
  Description of Artificial Sequence: Synthetic polypeptide

SEQ ID NO: 903 - DNA, 9 bp, Artificial Sequence
  Description of Artificial Sequence: Synthetic oligonucleotide
atgctcgag

SEQ ID NO: 904 - protein, 3 aa, Artificial Sequence
  Description of Artificial Sequence: Synthetic peptide
MLE

SEQ ID NO: 905 - DNA, 261 bp, Artificial Sequence; identical to SEQ ID NO: 531
  Description of Artificial Sequence: Synthetic polynucleotide

SEQ ID NO: 906 - protein, 107 aa, Artificial Sequence; identical to SEQ ID NO: 532
  Description of Artificial Sequence: Synthetic polypeptide

SEQ ID NO: 907 - DNA, 24 bp, Artificial Sequence
  Description of Artificial Sequence: Synthetic oligonucleotide
tcaggcggtggctcaggtgtcgag

SEQ ID NO: 908 - protein, 8 aa, Artificial Sequence
  Description of Artificial Sequence: Synthetic peptide
SGGGSGVD

SEQ ID NO: 909 - DNA, 864 bp, Artificial Sequence; identical to SEQ ID NO: 44
  Description of Artificial Sequence: Synthetic polynucleotide

SEQ ID NO: 910 - protein, 287 aa, Artificial Sequence; identical to SEQ ID NO: 536
  Description of Artificial Sequence: Synthetic polypeptide

SEQ ID NO: 911 - DNA, 57 bp, Artificial Sequence; identical to SEQ ID NO: 527
  Description of Artificial Sequence: Synthetic oligonucleotide

SEQ ID NO: 912 - protein, 18 aa, Artificial Sequence
  Description of Artificial Sequence: Synthetic peptide
EGRGSLLTCGDVEENPGP

SEQ ID NO: 913 - DNA, 9 bp, Artificial Sequence
  Description of Artificial Sequence: Synthetic oligonucleotide
atgctcgag

SEQ ID NO: 914 - protein, 3 aa, Artificial Sequence
  Description of Artificial Sequence: Synthetic peptide
MLE

SEQ ID NO: 915 - DNA, 321 bp, Artificial Sequence; identical to SEQ ID NO: 761
  Description of Artificial Sequence: Synthetic polynucleotide

SEQ ID NO: 916 - protein, 106 aa, Artificial Sequence; identical to SEQ ID NO: 520
  Description of Artificial Sequence: Synthetic polypeptide

SEQ ID NO: 917 - DNA, 24 bp, Artificial Sequence
  Description of Artificial Sequence: Synthetic oligonucleotide
tcaggcggtggctcaggtgtcgag

SEQ ID NO: 918 - protein, 8 aa, Artificial Sequence
  Description of Artificial Sequence: Synthetic peptide
SGGGSGVD

SEQ ID NO: 919 - DNA, 864 bp, Artificial Sequence; identical to SEQ ID NO: 44
  Description of Artificial Sequence: Synthetic polynucleotide

SEQ ID NO: 920 - protein, 287 aa, Artificial Sequence; identical to SEQ ID NO: 536
  Description of Artificial Sequence: Synthetic polypeptide

SEQ ID NO: 921 - DNA, 57 bp, Artificial Sequence; identical to SEQ ID NO: 527
  Description of Artificial Sequence: Synthetic oligonucleotide

SEQ ID NO: 922 - protein, 18 aa, Artificial Sequence
  Description of Artificial Sequence: Synthetic peptide
EGRGSLLTCGDVEENPGP

SEQ ID NO: 923 - DNA, 6 bp, Artificial Sequence
  Description of Artificial Sequence: Synthetic oligonucleotide
gccacc

SEQ ID NO: 924 - protein, 5 aa, Artificial Sequence
  Description of Artificial Sequence: Synthetic peptide
SGGGS

SEQ ID NO: 925 - protein, 5 aa, Artificial Sequence
  Description of Artificial Sequence: Synthetic peptide
GSGPR

SEQ ID NO: 926 - DNA, 15 bp, Artificial Sequence
  Description of Artificial Sequence: Synthetic oligonucleotide
atgctcgagcaattg

SEQ ID NO: 927 - protein, 5 aa, Artificial Sequence
  Description of Artificial Sequence: Synthetic peptide
MLEQL

SEQ ID NO: 928 - DNA, 321 bp, Artificial Sequence
  Description of Artificial Sequence: Synthetic polynucleotide
ggcgtgcaagtggaaactataagcccgggagacggccgcacatttcccaagagaggccagacctgcgtggtgcactatacaggaatgctggaggacgggaagaaattcgatagctcccgggatcgaaataagcctttcaaattcatgctgggcaagcaagaagtcatcagaggctgggaagaaggcgtcgcccagatgtccgtgggtcagcgcgccaagctgacaattagtccagattacgcctatggcgcaacaggccatcccggcatcatccccccacatgccacactcgtctttgatgtcgagctcctgaaactggag

SEQ ID NO: 929 - protein, 107 aa, Artificial Sequence
  Description of Artificial Sequence: Synthetic polypeptide
GVQVETISPGDGRTFPKRGQTCVVHYTGMLEDGKKFDSSRDRNKPFKFMLGKQEVIRGWEEGVAQMSVGQRAKLTISPDYAYGATGHPGIIPPHATLVFDVELLKLE

SEQ ID NO: 930 - DNA, 12 bp, Artificial Sequence
  Description of Artificial Sequence: Synthetic oligonucleotide
ggcgggcaattg

SEQ ID NO: 931 - protein, 4 aa, Artificial Sequence
  Description of Artificial Sequence: Synthetic peptide
GGQL

SEQ ID NO: 932 - DNA, 267 bp, Artificial Sequence
  Description of Artificial Sequence: Synthetic polynucleotide
gaaatgtggcatgaagggttggaagaagcttcaaggctgtacttcggagagaggaacgtgaagggcatgtttgaggttcttgaacctctgcacgccatgatggaacggggaccgcagacactgaaagaaacctcttttaatcaggcctacggcagagacctgatggaggcccaagaatggtgtagaaagtatatgaaatccggtaacgtgaaagacctgactcaggcctgggacctttattaccatgtgttcaggcggatcagtaag

SEQ ID NO: 933 - protein, 89 aa, Artificial Sequence
  Description of Artificial Sequence: Synthetic polypeptide
EMWHEGLEEASRLYFGERNVKGMFEVLEPLHAMMERGPQTLKETSFNQAYGRDLMEAQEWCRKYMKSGNVKDLTQAWDLYYHVFRRISK

SEQ ID NO: 934 - DNA, 24 bp, Artificial Sequence
  Description of Artificial Sequence: Synthetic oligonucleotide
tcaggcggtggctcaggtccatgg

SEQ ID NO: 935 - protein, 8 aa, Artificial Sequence
  Description of Artificial Sequence: Synthetic peptide
SGGGSGPW

SEQ ID NO: 936 - DNA, 858 bp, Artificial Sequence
  Description of Artificial Sequence: Synthetic polynucleotide
ggatttggtgatgtcggtgctcttgagagtttgaggggaaatgcagatttggcttacatcctgagcatggagccctgtggccactgcctcattatcaacaatgtgaacttctgccgtgagtccgggctccgcacccgcactggctccaacatcgactgtgagaagttgcggcgtcgcttctcctcgctgcatttcatggtggaggtgaagggcgacctgactgccaagaaaatggtgctggctttgctggagctggcgcggcaggaccacggtgctctggactgctgcgtggtggtcattctctctcacggctgtcaggccagccacctgcagttcccaggggctgtctacggcacagatggatgccctgtgtcggtcgagaagattgtgaacatcttcaatgggaccagctgccccagcctgggagggaagcccaagctctttttcatccaggcctgtggtggggagcagaaagatcatgggtttgaggtggcctccacttcccctgaagacgagtcccctggcagtaaccccgagccagatgccaccccgttccaggaaggtttgaggaccttcgaccagctggacgccatatctagtttgcccacacccagtgacatctttgtgtcctactctactttcccaggttttgtttcctggagggaccccaagagtggctcctggtacgttgagaccctggacgacatctttgagcagtgggctcactctgaagacctgcagtccctcctgcttagggtcgctaatgctgtttcggtgaaagggatttataaacagatgcctggttgctttaatttcctccggaaaaaacttttctttaaaacatcagctagcagagcc

SEQ ID NO: 937 - protein, 286 aa, Artificial Sequence
  Description of Artificial Sequence: Synthetic polypeptide
GFGDVGALESLRGNADLAYILSMEPCGHCLIINNVNFCRESGLRTRTGSNIDCEKLRRRFSSLHFMVEVKGDLTAKKMVLALLELARQDHGALDCCVVVILSHGCQASHLQFPGAVYGTDGCPVSVEKIVNIFNGTSCPSLGGKPKLFFIQACGGEQKDHGFEVASTSPEDESPGSNPEPDATPFQEGLRTFDQLDAISSLPTPSDIFVSYSTFPGFVSWRDPKSGSWYVETLDDIFEQWAHSEDLQSLLLRVANAVSVKGIYKQMPGCFNFLRKKLFFKTSASRA

SEQ ID NO: 938 - DNA, 15 bp, Artificial Sequence
  Description of Artificial Sequence: Synthetic oligonucleotide
ggatctggaccgcgg

SEQ ID NO: 939 - protein, 5 aa, Artificial Sequence
  Description of Artificial Sequence: Synthetic peptide
GSGPR

SEQ ID NO: 940 - DNA, 54 bp, Artificial Sequence; identical to SEQ ID NO: 138
  Description of Artificial Sequence: Synthetic oligonucleotide

SEQ ID NO: 941 - protein, 18 aa, Artificial Sequence
  Description of Artificial Sequence: Synthetic peptide
EGRGSLLTCGDVEENPGP

SEQ ID NO: 942 - DNA, 6 bp, Artificial Sequence
  Description of Artificial Sequence: Synthetic oligonucleotide
ccatgg

SEQ ID NO: 943 - protein, 2 aa, Artificial Sequence
  Description of Artificial Sequence: Synthetic peptide
PW

SEQ ID NO: 944 - DNA, 63 bp, Artificial Sequence; identical to SEQ ID NO: 142
  Description of Artificial Sequence: Synthetic oligonucleotide

SEQ ID NO: 945 - protein, 21 aa, Artificial Sequence
  Description of Artificial Sequence: Synthetic peptide
MEFGLSWLFLVAILKGVQCSR

SEQ ID NO: 946 - DNA, 321 bp, Artificial Sequence; identical to SEQ ID NO: 144
  Description of Artificial Sequence: Synthetic polynucleotide

SEQ ID NO: 947 - protein, 107 aa, Artificial Sequence; identical to SEQ ID NO: 145
  Description of Artificial Sequence: Synthetic polypeptide

SEQ ID NO: 948 - DNA, 24 bp, Artificial Sequence
  Description of Artificial Sequence: Synthetic oligonucleotide
ggcggaggaagcggaggtgggggc

SEQ ID NO: 949 - protein, 8 aa, Artificial Sequence
  Description of Artificial Sequence: Synthetic peptide
GGGSGGGG

SEQ ID NO: 950 - DNA, 360 bp, Artificial Sequence; identical to SEQ ID NO: 148
  Description of Artificial Sequence: Synthetic polynucleotide

SEQ ID NO: 951 - protein, 120 aa, Artificial Sequence; identical to SEQ ID NO: 149
  Description of Artificial Sequence: Synthetic polypeptide

SEQ ID NO: 952 - DNA, 6 bp, Artificial Sequence
  Description of Artificial Sequence: Synthetic oligonucleotide
ggatcc

SEQ ID NO: 953 - protein, 2 aa, Artificial Sequence
  Description of Artificial Sequence: Synthetic peptide
GS

SEQ ID NO: 954 - DNA, 48 bp, Artificial Sequence; identical to SEQ ID NO: 152
  Description of Artificial Sequence: Synthetic oligonucleotide

SEQ ID NO: 955 - protein, 16 aa, Artificial Sequence
  Description of Artificial Sequence: Synthetic peptide
ELPTQGTFSNVSTNVS

SEQ ID NO: 956 - DNA, 126 bp, Artificial Sequence; identical to SEQ ID NO: 154
  Description of Artificial Sequence: Synthetic polynucleotide

SEQ ID NO: 957 - protein, 42 aa, Artificial Sequence; identical to SEQ ID NO: 155
  Description of Artificial Sequence: Synthetic polypeptide

SEQ ID NO: 958 - DNA, 111 bp, Artificial Sequence; identical to SEQ ID NO: 156
  Description of Artificial Sequence: Synthetic polynucleotide

SEQ ID NO: 959 - protein, 37 aa, Artificial Sequence; identical to SEQ ID NO: 157
  Description of Artificial Sequence: Synthetic polypeptide

SEQ ID NO: 960 - DNA, 6 bp, Artificial Sequence
  Description of Artificial Sequence: Synthetic oligonucleotide
gtcgac

SEQ ID NO: 961 - protein, 2 aa, Artificial Sequence
  Description of Artificial Sequence: Synthetic peptide
VD

SEQ ID NO: 962 - DNA, 336 bp, Artificial Sequence; identical to SEQ ID NO: 426
  Description of Artificial Sequence: Synthetic polynucleotide

SEQ ID NO: 963 - protein, 112 aa, Artificial Sequence; identical to SEQ ID NO: 161
  Description of Artificial Sequence: Synthetic polypeptide

SEQ ID NO: 964 - DNA, 18 bp, Artificial Sequence
  Description of Artificial Sequence: Synthetic oligonucleotide
ggaacgcgtggatcggga

SEQ ID NO: 965 - protein, 6 aa, Artificial Sequence
  Description of Artificial Sequence: Synthetic peptide
GTRGSG

SEQ ID NO: 966 - DNA, 57 bp, Artificial Sequence; identical to SEQ ID NO: 737
  Description of Artificial Sequence: Synthetic oligonucleotide

SEQ ID NO: 967 - protein, 19 aa, Artificial Sequence
  Description of Artificial Sequence: Synthetic peptide
ATNFSLLKQAGDVEENPGP

SEQ ID NO: 968 - DNA, 516 bp, Artificial Sequence; identical to SEQ ID NO: 251
  Description of Artificial Sequence: Synthetic polynucleotide

SEQ ID NO: 969 - protein, 172 aa, Artificial Sequence; identical to SEQ ID NO: 240
  Description of Artificial Sequence: Synthetic polypeptide

SEQ ID NO: 970 - DNA, 6 bp, Artificial Sequence
  Description of Artificial Sequence: Synthetic oligonucleotide
gtcgag

SEQ ID NO: 971 - protein, 2 aa, Artificial Sequence
  Description of Artificial Sequence: Synthetic peptide
VE

SEQ ID NO: 972 - DNA, 186 bp, Artificial Sequence; identical to SEQ ID NO: 255
  Description of Artificial Sequence: Synthetic polynucleotide

SEQ ID NO: 973 - protein, 62 aa, Artificial Sequence; identical to SEQ ID NO: 216
  Description of Artificial Sequence: Synthetic polypeptide

SEQ ID NO: 974 - DNA, 6 bp, Artificial Sequence
  Description of Artificial Sequence: Synthetic oligonucleotide
gtcgag

SEQ ID NO: 975 - protein, 2 aa, Artificial Sequence
  Description of Artificial Sequence: Synthetic peptide
VE

SEQ ID NO: 976 - DNA, 321 bp, Artificial Sequence; identical to SEQ ID NO: 757
  Description of Artificial Sequence: Synthetic polynucleotide

SEQ ID NO: 977 - protein, 107 aa, Artificial Sequence; identical to SEQ ID NO: 3
  Description of Artificial Sequence: Synthetic polypeptide

SEQ ID NO: 978 - DNA, 6 bp, Artificial Sequence
  Description of Artificial Sequence: Synthetic oligonucleotide
gtcgag

SEQ ID NO: 979 - protein, 2 aa, Artificial Sequence
  Description of Artificial Sequence: Synthetic peptide
VE

SEQ ID NO: 980 - DNA, 321 bp, Artificial Sequence; identical to SEQ ID NO: 761
  Description of Artificial Sequence: Synthetic polynucleotide

SEQ ID NO: 981 - protein, 107 aa, Artificial Sequence; identical to SEQ ID NO: 3
  Description of Artificial Sequence: Synthetic polypeptide

SEQ ID NO: 982 - DNA, 3 bp, Artificial Sequence
  Description of Artificial Sequence: Synthetic oligonucleotide
tga

SEQ ID NO: 983 - DNA, 15 bp, Artificial Sequence
  Description of Artificial Sequence: Synthetic oligonucleotide
atgctcgagcaattg

SEQ ID NO: 984 - protein, 5 aa, Artificial Sequence
  Description of Artificial Sequence: Synthetic peptide
MLEQL

SEQ ID NO: 985 - DNA, 321 bp, Artificial Sequence; identical to SEQ ID NO: 928
  Description of Artificial Sequence: Synthetic polynucleotide

SEQ ID NO: 986 - protein, 107 aa, Artificial Sequence; identical to SEQ ID NO: 929
  Description of Artificial Sequence: Synthetic polypeptide

SEQ ID NO: 987 - DNA, 12 bp, Artificial Sequence
  Description of Artificial Sequence: Synthetic oligonucleotide
ggcgggcaattg

SEQ ID NO: 988 - protein, 4 aa, Artificial Sequence
  Description of Artificial Sequence: Synthetic peptide
GGQL

SEQ ID NO: 989 - DNA, 267 bp, Artificial Sequence; identical to SEQ ID NO: 932
  Description of Artificial Sequence: Synthetic polynucleotide

SEQ ID NO: 990 - protein, 89 aa, Artificial Sequence; identical to SEQ ID NO: 933
  Description of Artificial Sequence: Synthetic polypeptide

SEQ ID NO: 991 - DNA, 24 bp, Artificial Sequence
  Description of Artificial Sequence: Synthetic oligonucleotide
tcaggcggtggctcaggtccatgg

SEQ ID NO: 992 - protein, 8 aa, Artificial Sequence
  Description of Artificial Sequence: Synthetic peptide
SGGGSGPW

SEQ ID NO: 993 - DNA, 858 bp, Artificial Sequence; identical to SEQ ID NO: 936
  Description of Artificial Sequence: Synthetic polynucleotide

SEQ ID NO: 994 - protein, 286 aa, Artificial Sequence; identical to SEQ ID NO: 937
  Description of Artificial Sequence: Synthetic polypeptide

SEQ ID NO: 995 - DNA, 15 bp, Artificial Sequence
  Description of Artificial Sequence: Synthetic oligonucleotide
ggatctggaccgcgg

SEQ ID NO: 996 - protein, 5 aa, Artificial Sequence
  Description of Artificial Sequence: Synthetic peptide
GSGPR

SEQ ID NO: 997 - DNA, 54 bp, Artificial Sequence; identical to SEQ ID NO: 138
  Description of Artificial Sequence: Synthetic oligonucleotide

SEQ ID NO: 998 - protein, 18 aa, Artificial Sequence
  Description of Artificial Sequence: Synthetic peptide
EGRGSLLTCGDVEENPGP

SEQ ID NO: 999 - DNA, 6 bp, Artificial Sequence
  Description of Artificial Sequence: Synthetic oligonucleotide
ccatgg

SEQ ID NO: 1000 - protein, 2 aa, Artificial Sequence
  Description of Artificial Sequence: Synthetic peptide
PW

SEQ ID NO: 1001 - DNA, 63 bp, Artificial Sequence; identical to SEQ ID NO: 142
  Description of Artificial Sequence: Synthetic oligonucleotide

SEQ ID NO: 1002 - protein, 21 aa, Artificial Sequence
  Description of Artificial Sequence: Synthetic peptide
MEFGLSWLFLVAILKGVQCSR

SEQ ID NO: 1003 - DNA, 318 bp, Artificial Sequence
  Description of Artificial Sequence: Synthetic polynucleotide
gacatccaactgacgcaaagcccatctacactcagcgctagcatgggggacagggtcacaatcacgtgctctgcctcaagttccgttaggtttatccattggtatcagcagaaacctggaaaggccccaaaaagactgatctatgataccagcaagctggcttccggagtgccctcaaggttctcaggatctggcagtgggaccgatttcaccctgacaattagcagccttcagccagaggatttcgcaacctattactgtcagcaatgggggtccagcccattcactttcggccaaggaacaaaggtggagataaaa

SEQ ID NO: 1004 - protein, 106 aa, Artificial Sequence
  Description of Artificial Sequence: Synthetic polypeptide
DIQLTQSPSTLSASMGDRVTITCSASSSVRFIHWYQQKPGKAPKRLIYDTSKLASGVPSRFSGSGSGTDFTLTISSLQPEDFATYYCQQWGSSPFTFGQGTKVEIK

SEQ ID NO: 1005 - DNA, 24 bp, Artificial Sequence
  Description of Artificial Sequence: Synthetic oligonucleotide
ggcggaggaagcggaggtgggggc

SEQ ID NO: 1006 - protein, 8 aa, Artificial Sequence
  Description of Artificial Sequence: Synthetic peptide
GGGSGGGG

SEQ ID NO: 1007 - DNA, 336 bp, Artificial Sequence
  Description of Artificial Sequence: Synthetic polynucleotide
gaggtgcagctcgtggagtatggcgggggcctggtgcagcctgggggtagtctgaggctctcctgcgctgcctctggctttaacattaaagactactacatacattgggtgcggcaggccccaggcaaagggctcgaatgggtggcctggattgaccctgagaatggtgacactgagtttgtccccaagtttcagggcagagccaccatgagcgctgacacaagcaaaaacactgcttatctccaaatgaatagcctgcgagctgaagatacagcagtctattactgcaagacgggaggattctggggccagggaactctggtgacagttagttcc

SEQ ID NO: 1008 - protein, 112 aa, Artificial Sequence
  Description of Artificial Sequence: Synthetic polypeptide
EVQLVEYGGGLVQPGGSLRLSCAASGFNIKDYYIHWVRQAPGKGLEWVAWIDPENGDTEFVPKFQGRATMSADTSKNTAYLQMNSLRAEDTAVYYCKTGGFWGQGTLVTVSS

SEQ ID NO: 1009 - DNA, 6 bp, Artificial Sequence
  Description of Artificial Sequence: Synthetic oligonucleotide
ggatcc

SEQ ID NO: 1010 - protein, 2 aa, Artificial Sequence
  Description of Artificial Sequence: Synthetic peptide
GS

SEQ ID NO: 1011 - DNA, 48 bp, Artificial Sequence; identical to SEQ ID NO: 152
  Description of Artificial Sequence: Synthetic oligonucleotide

SEQ ID NO: 1012 - protein, 16 aa, Artificial Sequence
  Description of Artificial Sequence: Synthetic peptide
ELPTQGTFSNVSTNVS

SEQ ID NO: 1013 - DNA, 126 bp, Artificial Sequence; identical to SEQ ID NO: 154
  Description of Artificial Sequence: Synthetic polynucleotide

SEQ ID NO: 1014 - protein, 42 aa, Artificial Sequence; identical to SEQ ID NO: 155
  Description of Artificial Sequence: Synthetic polypeptide

SEQ ID NO: 1015 - DNA, 111 bp, Artificial Sequence; identical to SEQ ID NO: 156
  Description of Artificial Sequence: Synthetic polynucleotide

SEQ ID NO: 1016 - protein, 37 aa, Artificial Sequence; identical to SEQ ID NO: 157
  Description of Artificial Sequence: Synthetic polypeptide

SEQ ID NO: 1017 - DNA, 6 bp, Artificial Sequence
  Description of Artificial Sequence: Synthetic oligonucleotide
gtcgac

SEQ ID NO: 1018 - protein, 2 aa, Artificial Sequence
  Description of Artificial Sequence: Synthetic peptide
VD

SEQ ID NO: 1019 - DNA, 336 bp, Artificial Sequence; identical to SEQ ID NO: 426
  Description of Artificial Sequence: Synthetic polynucleotide

SEQ ID NO: 1020 - protein, 112 aa, Artificial Sequence; identical to SEQ ID NO: 161
  Description of Artificial Sequence: Synthetic polypeptide

SEQ ID NO: 1021 - DNA, 18 bp, Artificial Sequence
  Description of Artificial Sequence: Synthetic oligonucleotide
ggaacgcgtggatcggga

SEQ ID NO: 1022 - protein, 6 aa, Artificial Sequence
  Description of Artificial Sequence: Synthetic peptide
GTRGSG

SEQ ID NO: 1023 - DNA, 57 bp, Artificial Sequence; identical to SEQ ID NO: 737
  Description of Artificial Sequence: Synthetic oligonucleotide

SEQ ID NO: 1024 - protein, 19 aa, Artificial Sequence
  Description of Artificial Sequence: Synthetic peptide
ATNFSLLKQAGDVEENPGP

SEQ ID NO: 1025 - DNA, 516 bp, Artificial Sequence; identical to SEQ ID NO: 251
  Description of Artificial Sequence: Synthetic polynucleotide

SEQ ID NO: 1026 - protein, 172 aa, Artificial Sequence; identical to SEQ ID NO: 240
  Description of Artificial Sequence: Synthetic polypeptide

SEQ ID NO: 1027 - DNA, 6 bp, Artificial Sequence
  Description of Artificial Sequence: Synthetic oligonucleotide
gtcgag

SEQ ID NO: 1028 - protein, 2 aa, Artificial Sequence
  Description of Artificial Sequence: Synthetic peptide
VE

SEQ ID NO: 1029 - DNA, 186 bp, Artificial Sequence; identical to SEQ ID NO: 255
  Description of Artificial Sequence: Synthetic polynucleotide

SEQ ID NO: 1030 - protein, 62 aa, Artificial Sequence; identical to SEQ ID NO: 216
  Description of Artificial Sequence: Synthetic polypeptide

SEQ ID NO: 1031 - DNA, 6 bp, Artificial Sequence
  Description of Artificial Sequence: Synthetic oligonucleotide
gtcgag

SEQ ID NO: 1032 - protein, 2 aa, Artificial Sequence
  Description of Artificial Sequence: Synthetic peptide
VE

SEQ ID NO: 1033 - DNA, 321 bp, Artificial Sequence; identical to SEQ ID NO: 757
  Description of Artificial Sequence: Synthetic polynucleotide

SEQ ID NO: 1034 - protein, 107 aa, Artificial Sequence; identical to SEQ ID NO: 3
  Description of Artificial Sequence: Synthetic polypeptide

SEQ ID NO: 1035 - DNA, 6 bp, Artificial Sequence
  Description of Artificial Sequence: Synthetic oligonucleotide
gtcgag

SEQ ID NO: 1036 - protein, 2 aa, Artificial Sequence
  Description of Artificial Sequence: Synthetic peptide
VE

SEQ ID NO: 1037 - DNA, 321 bp, Artificial Sequence; identical to SEQ ID NO: 761
  Description of Artificial Sequence: Synthetic polynucleotide

SEQ ID NO: 1038 - protein, 107 aa, Artificial Sequence; identical to SEQ ID NO: 3
  Description of Artificial Sequence: Synthetic polypeptide

SEQ ID NO: 1039 - DNA, 3 bp, Artificial Sequence
  Description of Artificial Sequence: Synthetic oligonucleotide
tga

SEQ ID NO: 1040 - DNA, 9 bp, Artificial Sequence
  Description of Artificial Sequence: Synthetic oligonucleotide
atgctcgag

SEQ ID NO: 1041 - protein, 3 aa, Artificial Sequence
  Description of Artificial Sequence: Synthetic peptide
MLE

SEQ ID NO: 1042 - DNA, 267 bp, Artificial Sequence; identical to SEQ ID NO: 932
  Description of Artificial Sequence: Synthetic polynucleotide

SEQ ID NO: 1043 - protein, 89 aa, Artificial Sequence; identical to SEQ ID NO: 933
  Description of Artificial Sequence: Synthetic polypeptide

SEQ ID NO: 1044 - DNA, 18 bp, Artificial Sequence
  Description of Artificial Sequence: Synthetic oligonucleotide
tcaggcggtggctcaggt

SEQ ID NO: 1045 - protein, 6 aa, Artificial Sequence
  Description of Artificial Sequence: Synthetic peptide
SGGGSG

SEQ ID NO: 1046 - DNA, 318 bp, Artificial Sequence
  Description of Artificial Sequence: Synthetic polynucleotide
ggcgtccaagtcgaaaccattagtcccggcgatggcagaacatttcctaaaaggggacaaacatgtgtcgtccattatacaggcatgttggaggacggcaaaaagttcgacagtagtagagatcgcaataaacctttcaaattcatgttgggaaaacaagaagtcattaggggatgggaggagggcgtggctcaaatgtccgtcggccaacgcgctaagctcaccatcagccccgactacgcatacggcgctaccggacatcccggaattattccccctcacgctaccttggtgtttgacgtcgaactgttgaagctc

SEQ ID NO: 1047 - protein, 106 aa, Artificial Sequence
  Description of Artificial Sequence: Synthetic polypeptide
GVQVETISPGDGRTFPKRGQTCVVHYTGMLEDGKKFDSSRDRNKPFKFMLGKQEVIRGWEEGVAQMSVGQRAKLTISPDYAYGATGHPGIIPPHATLVFDVELLKL

SEQ ID NO: 1048 - DNA, 24 bp, Artificial Sequence
  Description of Artificial Sequence: Synthetic oligonucleotide
tcggggggcggatcaggagtcgac

SEQ ID NO: 1049 - protein, 7 aa, Artificial Sequence
  Description of Artificial Sequence: Synthetic peptide
SGGGSVD

SEQ ID NO: 1050 - DNA, 858 bp, Artificial Sequence
  Description of Artificial Sequence: Synthetic polynucleotide
ggatttggtgatgtcggtgctcttgagagtttgaggggaaatgcagatttggcttacatcctgagcatggagccctgtggccactgcctcattatcaacaatgtgaacttctgccgtgagtccgggctccgcacccgcactggctccaacatcgactgtgagaagttgcggcgtcgcttctcctcgctgcatttcatggtggaggtgaagggcgacctgactgccaagaaaatggtgctggctttgctggagctggcgcggcaggaccacggtgctctggactgctgcgtggtggtcattctctctcacggctgtcaggccagccacctgcagttcccaggggctgtctacggcacagatggatgccctgtgtcggtcgagaagattgtgaacatcttcaatgggaccagctgccccagcctgggagggaagcccaagctctttttcatccaggcctgtggtggggagcagaaagaccatgggtttgaggtggcctccacttcccctgaagacgagtcccctggcagtaaccccgagccagatgccaccccgttccaggaaggtttgaggaccttcgaccagctggacgccatatctagtttgcccacacccagtgacatctttgtgtcctactctactttcccaggttttgtttcctggagggaccccaagagtggctcctggtacgttgagaccctggacgacatctttgagcagtgggctcactctgaagacctgcagtccctcctgcttagggtcgctaatgctgtttcggtgaaagggatttataaacagatgcctggttgctttaatttcctccggaaaaaacttttctttaaaacatcagctagcagagcc

SEQ ID NO: 1051 - protein, 286 aa, Artificial Sequence; identical to SEQ ID NO: 937
  Description of Artificial Sequence: Synthetic polypeptide

SEQ ID NO: 1052 - DNA, 6 bp, Artificial Sequence
  Description of Artificial Sequence: Synthetic oligonucleotide
ccgcgg

SEQ ID NO: 1053 - protein, 2 aa, Artificial Sequence
  Description of Artificial Sequence: Synthetic peptide
PR

SEQ ID NO: 1054 - DNA, 54 bp, Artificial Sequence; identical to SEQ ID NO: 138
  Description of Artificial Sequence: Synthetic oligonucleotide

SEQ ID NO: 1055 - protein, 18 aa, Artificial Sequence
  Description of Artificial Sequence: Synthetic peptide
EGRGSLLTCGDVEENPGP

SEQ ID NO: 1056 - DNA, 999 bp, Artificial Sequence
  Description of Artificial Sequence: Synthetic polynucleotide
atgccaccacctcgcctgctgttctttctgctgttcctgacacctatggaggtgcgacctgaggaaccactggtcgtgaaggtcgaggaaggcgacaatgccgtgctgcagtgcctgaaaggcacttctgatgggccaactcagcagctgacctggtccagggagtctcccctgaagccttttctgaaactgagcctgggactgccaggactgggaatccacatgcgccctctggctatctggctgttcatcttcaacgtgagccagcagatgggaggattctacctgtgccagccaggaccaccatccgagaaggcctggcagcctggatggaccgtcaacgtggaggggtctggagaactgtttaggtggaatgtgagtgacctgggaggactgggatgtgggctgaagaaccgctcctctgaaggcccaagttcaccctcagggaagctgatgagcccaaaactgtacgtgtgggccaaagatcggcccgagatctgggagggagaacctccatgcctgccacctagagacagcctgaatcagagtctgtcacaggatctgacaatggcccccgggtccactctgtggctgtcttgtggagtcccacccgacagcgtgtccagaggccctctgtcctggacccacgtgcatcctaaggggccaaaaagtctgctgtcactggaactgaaggacgatcggcctgccagagacatgtgggtcatggagactggactgctgctgccacgagcaaccgcacaggatgctggaaaatactattgccaccggggcaatctgacaatgtccttccatctggagatcactgcaaggcccgtgctgtggcactggctgctgcgaaccggaggatggaaggtcagtgctgtgacactggcatatctgatcttttgcctgtgctccctggtgggcattctgcatctgcagagagccctggtgctgcggagaaagagaaagagaatgactgacccaacaagaaggttt

SEQ ID NO: 1057 - protein, 333 aa, Artificial Sequence; identical to SEQ ID NO: 15
  Description of Artificial Sequence: Synthetic polypeptide

SEQ ID NO: 1058 - DNA, 3 bp, Artificial Sequence
  Description of Artificial Sequence: Synthetic oligonucleotide
tga

SEQ ID NO: 1059 - DNA, 9 bp, Artificial Sequence
  Description of Artificial Sequence: Synthetic oligonucleotide
atgctcgag

SEQ ID NO: 1060 - protein, 3 aa, Artificial Sequence
  Description of Artificial Sequence: Synthetic peptide
MLE

SEQ ID NO: 1061 - DNA, 318 bp, Artificial Sequence; identical to SEQ ID NO: 1046
  Description of Artificial Sequence: Synthetic polynucleotide

SEQ ID NO: 1062 - protein, 106 aa, Artificial Sequence; identical to SEQ ID NO: 1047
  Description of Artificial Sequence: Synthetic polypeptide

SEQ ID NO: 1063 - DNA, 17 bp, Artificial Sequence
  Description of Artificial Sequence: Synthetic oligonucleotide
tcggggggcggatcagg

SEQ ID NO: 1064 - protein, 5 aa, Artificial Sequence
  Description of Artificial Sequence: Synthetic peptide
SGGGS

SEQ ID NO: 1065 - DNA, 267 bp, Artificial Sequence; identical to SEQ ID NO: 932
  Description of Artificial Sequence: Synthetic polynucleotide

SEQ ID NO: 1066 - protein, 89 aa, Artificial Sequence; identical to SEQ ID NO: 933
  Description of Artificial Sequence: Synthetic polypeptide

SEQ ID NO: 1067 - DNA, 24 bp, Artificial Sequence
  Description of Artificial Sequence: Synthetic oligonucleotide
tcaggcggtggctcaggtgtcgac

SEQ ID NO: 1068 - protein, 8 aa, Artificial Sequence
  Description of Artificial Sequence: Synthetic peptide
SGGGSGVD

SEQ ID NO: 1069 - DNA, 858 bp, Artificial Sequence; identical to SEQ ID NO: 1050
  Description of Artificial Sequence: Synthetic polynucleotide

SEQ ID NO: 1070 - protein, 286 aa, Artificial Sequence; identical to SEQ ID NO: 937
  Description of Artificial Sequence: Synthetic polypeptide

SEQ ID NO: 1071 - DNA, 6 bp, Artificial Sequence
  Description of Artificial Sequence: Synthetic oligonucleotide
ccgcgg

SEQ ID NO: 1072 - protein, 2 aa, Artificial Sequence
  Description of Artificial Sequence: Synthetic peptide
PR

SEQ ID NO: 1073 - DNA, 54 bp, Artificial Sequence; identical to SEQ ID NO: 138
  Description of Artificial Sequence: Synthetic oligonucleotide

SEQ ID NO: 1074 - protein, 18 aa, Artificial Sequence
  Description of Artificial Sequence: Synthetic peptide
EGRGSLLTCGDVEENPGP

SEQ ID NO: 1075 - DNA, 999 bp, Artificial Sequence; identical to SEQ ID NO: 1056
  Description of Artificial Sequence: Synthetic polynucleotide

SEQ ID NO: 1076 - protein, 333 aa, Artificial Sequence; identical to SEQ ID NO: 15
  Description of Artificial Sequence: Synthetic polypeptide

SEQ ID NO: 1077 - DNA, 3 bp, Artificial Sequence
  Description of Artificial Sequence: Synthetic oligonucleotide
tga

SEQ ID NO: 1078 - DNA, 15 bp, Artificial Sequence
  Description of Artificial Sequence: Synthetic oligonucleotide
atgctcgagcaattg

SEQ ID NO: 1079 - protein, 5 aa, Artificial Sequence
  Description of Artificial Sequence: Synthetic peptide
MLEQL

SEQ ID NO: 1080 - DNA, 321 bp, Artificial Sequence; identical to SEQ ID NO: 928
  Description of Artificial Sequence: Synthetic polynucleotide

SEQ ID NO: 1081 - protein, 107 aa, Artificial Sequence; identical to SEQ ID NO: 929
  Description of Artificial Sequence: Synthetic polypeptide

SEQ ID NO: 1082 - DNA, 12 bp, Artificial Sequence
  Description of Artificial Sequence: Synthetic oligonucleotide
ggcgggcaattg

SEQ ID NO: 1083 - protein, 4 aa, Artificial Sequence
  Description of Artificial Sequence: Synthetic peptide
GGQL

SEQ ID NO: 1084 - DNA, 267 bp, Artificial Sequence
  Description of Artificial Sequence: Synthetic polynucleotide
gaaatgtggcatgaagggttggaagaagcttcaaggctgtacttcggagagaggaacgtgaagggcatgtttgaggttcttgaacctctgcacgccatgatggaacggggaccgcagacactgaaagaaacctcttttaatcaggcctacggcagagacctgatggaggcccaagaatggtgtagaaagtatatgaaatccggtaacgtgaaagacctgcttcaggcctgggacctttattaccatgtgttcaggcggatcagtaag

SEQ ID NO: 1085 - protein, 89 aa, Artificial Sequence
  Description of Artificial Sequence: Synthetic polypeptide
EMWHEGLEEASRLYFGERNVKGMFEVLEPLHAMMERGPQTLKETSFNQAYGRDLMEAQEWCRKYMKSGNVKDLLQAWDLYYHVFRRISK

SEQ ID NO: 1086 - DNA, 24 bp, Artificial Sequence
  Description of Artificial Sequence: Synthetic oligonucleotide
tcaggcggtggctcaggtccatgg

SEQ ID NO: 1087 - protein, 8 aa, Artificial Sequence
  Description of Artificial Sequence: Synthetic peptide
SGGGSGPW

SEQ ID NO: 1088 - DNA, 858 bp, Artificial Sequence; identical to SEQ ID NO: 936
  Description of Artificial Sequence: Synthetic polynucleotide

SEQ ID NO: 1089 - protein, 286 aa, Artificial Sequence; identical to SEQ ID NO: 937
  Description of Artificial Sequence: Synthetic polypeptide

SEQ ID NO: 1090 - DNA, 15 bp, Artificial Sequence
  Description of Artificial Sequence: Synthetic oligonucleotide
ggatctggaccgcgg

SEQ ID NO: 1091 - protein, 5 aa, Artificial Sequence
  Description of Artificial Sequence: Synthetic peptide
GSGPR

SEQ ID NO: 1092 - DNA, 54 bp, Artificial Sequence; identical to SEQ ID NO: 138
  Description of Artificial Sequence: Synthetic oligonucleotide

SEQ ID NO: 1093 - protein, 18 aa, Artificial Sequence
  Description of Artificial Sequence: Synthetic peptide
EGRGSLLTCGDVEENPGP

SEQ ID NO: 1094 - DNA, 6 bp, Artificial Sequence
  Description of Artificial Sequence: Synthetic oligonucleotide
ccatgg

SEQ ID NO: 1095 - protein, 2 aa, Artificial Sequence
  Description of Artificial Sequence: Synthetic peptide
PW

SEQ ID NO: 1096 - DNA, 63 bp, Artificial Sequence; identical to SEQ ID NO: 142
  Description of Artificial Sequence: Synthetic oligonucleotide

SEQ ID NO: 1097 - protein, 21 aa, Artificial Sequence
  Description of Artificial Sequence: Synthetic peptide
MEFGLSWLFLVAILKGVQCSR

SEQ ID NO: 1098 - DNA, 318 bp, Artificial Sequence; identical to SEQ ID NO: 1003
  Description of Artificial Sequence: Synthetic polynucleotide

SEQ ID NO: 1099 - protein, 106 aa, Artificial Sequence; identical to SEQ ID NO: 1004
  Description of Artificial Sequence: Synthetic polypeptide

SEQ ID NO: 1100 - DNA, 24 bp, Artificial Sequence
  Description of Artificial Sequence: Synthetic oligonucleotide
ggcggaggaagcggaggtgggggc

SEQ ID NO: 1101 - protein, 8 aa, Artificial Sequence
  Description of Artificial Sequence: Synthetic peptide
GGGSGGGG

SEQ ID NO: 1102 - DNA, 336 bp, Artificial Sequence; identical to SEQ ID NO: 1007
  Description of Artificial Sequence: Synthetic polynucleotide

SEQ ID NO: 1103 - protein, 112 aa, Artificial Sequence; identical to SEQ ID NO: 1008
  Description of Artificial Sequence: Synthetic polypeptide

SEQ ID NO: 1104 - DNA, 6 bp, Artificial Sequence
  Description of Artificial Sequence: Synthetic oligonucleotide
ggatcc

SEQ ID NO: 1105 - protein, 2 aa, Artificial Sequence
  Description of Artificial Sequence: Synthetic peptide
GS

SEQ ID NO: 1106 - DNA, 48 bp, Artificial Sequence; identical to SEQ ID NO: 152
  Description of Artificial Sequence: Synthetic oligonucleotide

SEQ ID NO: 1107 - protein, 16 aa, Artificial Sequence
  Description of Artificial Sequence: Synthetic peptide
ELPTQGTFSNVSTNVS

SEQ ID NO: 1108 - DNA, 126 bp, Artificial Sequence; identical to SEQ ID NO: 154
  Description of Artificial Sequence: Synthetic polynucleotide

SEQ ID NO: 1109 - protein, 42 aa, Artificial Sequence; identical to SEQ ID NO: 155
  Description of Artificial Sequence: Synthetic polypeptide

SEQ ID NO: 1110 - DNA, 111 bp, Artificial Sequence; identical to SEQ ID NO: 156
  Description of Artificial Sequence: Synthetic polynucleotide

SEQ ID NO: 1111 - protein, 37 aa, Artificial Sequence; identical to SEQ ID NO: 157
  Description of Artificial Sequence: Synthetic polypeptide

SEQ ID NO: 1112 - DNA, 6 bp, Artificial Sequence
  Description of Artificial Sequence: Synthetic oligonucleotide
gtcgac

SEQ ID NO: 1113 - protein, 2 aa, Artificial Sequence
  Description of Artificial Sequence: Synthetic peptide
VD

SEQ ID NO: 1114 - DNA, 336 bp, Artificial Sequence; identical to SEQ ID NO: 426
  Description of Artificial Sequence: Synthetic polynucleotide

SEQ ID NO: 1115 - protein, 112 aa, Artificial Sequence; identical to SEQ ID NO: 161
  Description of Artificial Sequence: Synthetic polypeptide

SEQ ID NO: 1116 - DNA, 18 bp, Artificial Sequence
  Description of Artificial Sequence: Synthetic oligonucleotide
ggaacgcgtggatcggga

SEQ ID NO: 1117 - protein, 6 aa, Artificial Sequence
  Description of Artificial Sequence: Synthetic peptide
GTRGSG

SEQ ID NO: 1118 - DNA, 57 bp, Artificial Sequence; identical to SEQ ID NO: 737
  Description of Artificial Sequence: Synthetic oligonucleotide

SEQ ID NO: 1119 - protein, 19 aa, Artificial Sequence
  Description of Artificial Sequence: Synthetic peptide
ATNFSLLKQAGDVEENPGP

SEQ ID NO: 1120 - DNA, 516 bp, Artificial Sequence; identical to SEQ ID NO: 251
  Description of Artificial Sequence: Synthetic polynucleotide

SEQ ID NO: 1121 - protein, 172 aa, Artificial Sequence; identical to SEQ ID NO: 240
  Description of Artificial Sequence: Synthetic polypeptide

SEQ ID NO: 1122 - DNA, 6 bp, Artificial Sequence
  Description of Artificial Sequence: Synthetic oligonucleotide
gtcgag

SEQ ID NO: 1123 - protein, 2 aa, Artificial Sequence
  Description of Artificial Sequence: Synthetic peptide
VE

SEQ ID NO: 1124 - DNA, 186 bp, Artificial Sequence; identical to SEQ ID NO: 255
  Description of Artificial Sequence: Synthetic polynucleotide

SEQ ID NO: 1125 - protein, 62 aa, Artificial Sequence; identical to SEQ ID NO: 216
  Description of Artificial Sequence: Synthetic polypeptide

SEQ ID NO: 1126 - DNA, 6 bp, Artificial Sequence
  Description of Artificial Sequence: Synthetic oligonucleotide
gtcgag

SEQ ID NO: 1127 - protein, 2 aa, Artificial Sequence
  Description of Artificial Sequence: Synthetic peptide
VE

SEQ ID NO: 1128 - DNA, 321 bp, Artificial Sequence; identical to SEQ ID NO: 757
  Description of Artificial Sequence: Synthetic polynucleotide

SEQ ID NO: 1129 - protein, 107 aa, Artificial Sequence; identical to SEQ ID NO: 3
  Description of Artificial Sequence: Synthetic polypeptide

SEQ ID NO: 1130 - DNA, 6 bp, Artificial Sequence
  Description of Artificial Sequence: Synthetic oligonucleotide
gtcgag

SEQ ID NO: 1131 - protein, 2 aa, Artificial Sequence
  Description of Artificial Sequence: Synthetic peptide
VE

SEQ ID NO: 1132 - DNA, 321 bp, Artificial Sequence; identical to SEQ ID NO: 761
  Description of Artificial Sequence: Synthetic polynucleotide

SEQ ID NO: 1133 - protein, 107 aa, Artificial Sequence; identical to SEQ ID NO: 3
  Description of Artificial Sequence: Synthetic polypeptide

SEQ ID NO: 1134 - DNA, 3 bp, Artificial Sequence
  Description of Artificial Sequence: Synthetic oligonucleotide
tga

SEQ ID NO: 1135 - DNA, 15 bp, Artificial Sequence
  Description of Artificial Sequence: Synthetic oligonucleotide
atgctcgagcaattg

SEQ ID NO: 1136 - protein, 5 aa, Artificial Sequence
  Description of Artificial Sequence: Synthetic peptide
MLEQL

SEQ ID NO: 1137 - DNA, 321 bp, Artificial Sequence; identical to SEQ ID NO: 928
  Description of Artificial Sequence: Synthetic polynucleotide

SEQ ID NO: 1138 - protein, 107 aa, Artificial Sequence; identical to SEQ ID NO: 929
  Description of Artificial Sequence: Synthetic polypeptide

SEQ ID NO: 1139 - DNA, 12 bp, Artificial Sequence
  Description of Artificial Sequence: Synthetic oligonucleotide
ggcgggcaattg

SEQ ID NO: 1140 - protein, 4 aa, Artificial Sequence
  Description of Artificial Sequence: Synthetic peptide
GGQL

SEQ ID NO: 1141 - DNA, 267 bp, Artificial Sequence; identical to SEQ ID NO: 932
  Description of Artificial Sequence: Synthetic polynucleotide

SEQ ID NO: 1142 - protein, 89 aa, Artificial Sequence; identical to SEQ ID NO: 933
  Description of Artificial Sequence: Synthetic polypeptide

SEQ ID NO: 1143 - DNA, 24 bp, Artificial Sequence
  Description of Artificial Sequence: Synthetic oligonucleotide
tcaggcggtggctcaggtccatgg

SEQ ID NO: 1144 - protein, 8 aa, Artificial Sequence
  Description of Artificial Sequence: Synthetic peptide
SGGGSGPW

SEQ ID NO: 1145 - DNA, 858 bp, Artificial Sequence
  Description of Artificial Sequence: Synthetic polynucleotide
ggatttggtgatgtcggtgctcttgagagtttgaggggaaatgcagatttggcttacatcctgagcatggagccctgtggccactgcctcattatcaacaatgtgaacttctgccgtgagtccgggctccgcacccgcactggctccaacatcgactgtgagaagttgcggcgtcgcttctcctcgctgcatttcatggtggaggtgaagggcgacctgactgccaagaaaatggtgctggctttgctggagctggcgcggcaggaccacggtgctctggactgctgcgtggtggtcattctctctcacggctgtcaggccagccacctgcagttcccaggggctgtctacggcacagatggatgccctgtgtcggtcgagaagattgtgaacatcttcaatgggaccagctgccccagcctgggagggaagcccaagctctttttcatccaggcctgtggtggggagcagaaagatcatgggtttgaggtggcctccacttcccctgaagacgagtcccctggcagtaaccccgagccagatgccaccccgttccaggaaggtttgaggaccttcgaccagctggacgccatatctagtttgcccacacccagtgacatctttgtgtcctactctactttcccaggttttgtttcctggagggaccccaagagtggctcctggtacgttgagaccctggacgacatctttgagcagtgggctcactctgaagacctgcagtccctcctgcttagggtcgctaatgctgtttcggtgaaagggatttataaacagatgcctggttgctttcaattcctccggaaaaaacttttctttaaaacatcagctagcagagcc

SEQ ID NO: 1146 - protein, 286 aa, Artificial Sequence
  Description of Artificial Sequence: Synthetic polypeptide
GFGDVGALESLRGNADLAYILSMEPCGHCLIINNVNFCRESGLRTRTGSNIDCEKLRRRFSSLHFMVEVKGDLTAKKMVLALLELARQDHGALDCCVVVILSHGCQASHLQFPGAVYGTDGCPVSVEKIVNIFNGTSCPSLGGKPKLFFIQACGGEQKDHGFEVASTSPEDESPGSNPEPDATPFQEGLRTFDQLDAISSLPTPSDIFVSYSTFPGFVSWRDPKSGSWYVETLDDIFEQWAHSEDLQSLLLRVANAVSVKGIYKQMPGCFQFLRKKLFFKTSASRA

SEQ ID NO: 1147 - DNA, 15 bp, Artificial Sequence
  Description of Artificial Sequence: Synthetic oligonucleotide
ggatctggaccgcgg

SEQ ID NO: 1148 - protein, 5 aa, Artificial Sequence
  Description of Artificial Sequence: Synthetic peptide
GSGPR

SEQ ID NO: 1149 - DNA, 54 bp, Artificial Sequence; identical to SEQ ID NO: 138
  Description of Artificial Sequence: Synthetic oligonucleotide

SEQ ID NO: 1150 - protein, 18 aa, Artificial Sequence
  Description of Artificial Sequence: Synthetic peptide
EGRGSLLTCGDVEENPGP

SEQ ID NO: 1151 - DNA, 6 bp, Artificial Sequence
  Description of Artificial Sequence: Synthetic oligonucleotide
ccatgg

SEQ ID NO: 1152 - protein, 2 aa, Artificial Sequence
  Description of Artificial Sequence: Synthetic peptide
PW

SEQ ID NO: 1153 - DNA, 63 bp, Artificial Sequence; identical to SEQ ID NO: 142
  Description of Artificial Sequence: Synthetic oligonucleotide

SEQ ID NO: 1154 - protein, 21 aa, Artificial Sequence
  Description of Artificial Sequence: Synthetic peptide
MEFGLSWLFLVAILKGVQCSR

SEQ ID NO: 1155 - DNA, 318 bp, Artificial Sequence; identical to SEQ ID NO: 1003
  Description of Artificial Sequence: Synthetic polynucleotide

SEQ ID NO: 1156 - protein, 106 aa, Artificial Sequence; identical to SEQ ID NO: 1004
  Description of Artificial Sequence: Synthetic polypeptide

SEQ ID NO: 1157 - DNA, 24 bp, Artificial Sequence
  Description of Artificial Sequence: Synthetic oligonucleotide
ggcggaggaagcggaggtgggggc

SEQ ID NO: 1158 - protein, 8 aa, Artificial Sequence
  Description of Artificial Sequence: Synthetic peptide
GGGSGGGG

SEQ ID NO: 1159 - DNA, 336 bp, Artificial Sequence; identical to SEQ ID NO: 1007
  Description of Artificial Sequence: Synthetic polynucleotide

SEQ ID NO: 1160 - protein, 112 aa, Artificial Sequence; identical to SEQ ID NO: 1008
  Description of Artificial Sequence: Synthetic polypeptide

SEQ ID NO: 1161 - DNA, 6 bp, Artificial Sequence
  Description of Artificial Sequence: Synthetic oligonucleotide
ggatcc

SEQ ID NO: 1162 - protein, 2 aa, Artificial Sequence
  Description of Artificial Sequence: Synthetic peptide
GS

SEQ ID NO: 1163 - DNA, 48 bp, Artificial Sequence; identical to SEQ ID NO: 152
  Description of Artificial Sequence: Synthetic oligonucleotide

SEQ ID NO: 1164 - protein, 16 aa, Artificial Sequence
  Description of Artificial Sequence: Synthetic peptide
ELPTQGTFSNVSTNVS

SEQ ID NO: 1165 - DNA, 126 bp, Artificial Sequence; identical to SEQ ID NO: 154
  Description of Artificial Sequence: Synthetic polynucleotide

SEQ ID NO: 1166 - protein, 42 aa, Artificial Sequence; identical to SEQ ID NO: 155
  Description of Artificial Sequence: Synthetic polypeptide

SEQ ID NO: 1167 - DNA, 111 bp, Artificial Sequence; identical to SEQ ID NO: 156
  Description of Artificial Sequence: Synthetic polynucleotide

SEQ ID NO: 1168 - protein, 37 aa, Artificial Sequence; identical to SEQ ID NO: 157
  Description of Artificial Sequence: Synthetic polypeptide

SEQ ID NO: 1169 - DNA, 6 bp, Artificial Sequence
  Description of Artificial Sequence: Synthetic oligonucleotide
gtcgac

SEQ ID NO: 1170 - protein, 2 aa, Artificial Sequence
  Description of Artificial Sequence: Synthetic peptide
VD

SEQ ID NO: 1171 - DNA, 336 bp, Artificial Sequence; identical to SEQ ID NO: 426
  Description of Artificial Sequence: Synthetic polynucleotide

SEQ ID NO: 1172 - protein, 112 aa, Artificial Sequence; identical to SEQ ID NO: 161
  Description of Artificial Sequence: Synthetic polypeptide

SEQ ID NO: 1173 - DNA, 18 bp, Artificial Sequence
  Description of Artificial Sequence: Synthetic oligonucleotide
ggaacgcgtggatcggga

SEQ ID NO: 1174 - protein, 6 aa, Artificial Sequence
  Description of Artificial Sequence: Synthetic peptide
GTRGSG

SEQ ID NO: 1175 - DNA, 57 bp, Artificial Sequence; identical to SEQ ID NO: 737
  Description of Artificial Sequence: Synthetic oligonucleotide

SEQ ID NO: 1176 - protein, 19 aa, Artificial Sequence
  Description of Artificial Sequence: Synthetic peptide
ATNFSLLKQAGDVEENPGP

SEQ ID NO: 1177 - DNA, 516 bp, Artificial Sequence; identical to SEQ ID NO: 251
  Description of Artificial Sequence: Synthetic polynucleotide

SEQ ID NO: 1178 - protein, 172 aa, Artificial Sequence; identical to SEQ ID NO: 240
  Description of Artificial Sequence: Synthetic polypeptide

SEQ ID NO: 1179 - DNA, 6 bp, Artificial Sequence
  Description of Artificial Sequence: Synthetic oligonucleotide
gtcgag

SEQ ID NO: 1180 - protein, 2 aa, Artificial Sequence
  Description of Artificial Sequence: Synthetic peptide
VE

SEQ ID NO: 1181 - DNA, 186 bp, Artificial Sequence; identical to SEQ ID NO: 255
  Description of Artificial Sequence: Synthetic polynucleotide

SEQ ID NO: 1182 - protein, 62 aa, Artificial Sequence; identical to SEQ ID NO: 216
  Description of Artificial Sequence: Synthetic polypeptide

SEQ ID NO: 1183 - DNA, 6 bp, Artificial Sequence
  Description of Artificial Sequence: Synthetic oligonucleotide
gtcgag

SEQ ID NO: 1184 - protein, 2 aa, Artificial Sequence
  Description of Artificial Sequence: Synthetic peptide
VE

SEQ ID NO: 1185 - DNA, 321 bp, Artificial Sequence; identical to SEQ ID NO: 757
  Description of Artificial Sequence: Synthetic polynucleotide

SEQ ID NO: 1186 - protein, 107 aa, Artificial Sequence; identical to SEQ ID NO: 3
  Description of Artificial Sequence: Synthetic polypeptide

SEQ ID NO: 1187 - DNA, 6 bp, Artificial Sequence
  Description of Artificial Sequence: Synthetic oligonucleotide
gtcgag

SEQ ID NO: 1188 - protein, 2 aa, Artificial Sequence
  Description of Artificial Sequence: Synthetic peptide
VE

SEQ ID NO: 1189 - DNA, 321 bp, Artificial Sequence; identical to SEQ ID NO: 761
  Description of Artificial Sequence: Synthetic polynucleotide

SEQ ID NO: 1190 - protein, 107 aa, Artificial Sequence; identical to SEQ ID NO: 3
  Description of Artificial Sequence: Synthetic polypeptide

SEQ ID NO: 1191 - DNA, 3 bp, Artificial Sequence
  Description of Artificial Sequence: Synthetic oligonucleotide
tga

SEQ ID NO: 1192 - DNA, 15 bp, Artificial Sequence
  Description of Artificial Sequence: Synthetic oligonucleotide
atgctcgagcaattg

SEQ ID NO: 1193 - protein, 5 aa, Artificial Sequence
  Description of Artificial Sequence: Synthetic peptide
MLEQL

SEQ ID NO: 1194 - DNA, 321 bp, Artificial Sequence; identical to SEQ ID NO: 928
  Description of Artificial Sequence: Synthetic polynucleotide

SEQ ID NO: 1195 - protein, 107 aa, Artificial Sequence; identical to SEQ ID NO: 929
  Description of Artificial Sequence: Synthetic polypeptide

SEQ ID NO: 1196 - DNA, 12 bp, Artificial Sequence
  Description of Artificial Sequence: Synthetic oligonucleotide
ggcgggcaattg

SEQ ID NO: 1197 - protein, 4 aa, Artificial Sequence
  Description of Artificial Sequence: Synthetic peptide
GGQL

SEQ ID NO: 1198 - DNA, 267 bp, Artificial Sequence; identical to SEQ ID NO: 932
  Description of Artificial Sequence: Synthetic polynucleotide

SEQ ID NO: 1199 - protein, 89 aa, Artificial Sequence; identical to SEQ ID NO: 933
  Description of Artificial Sequence: Synthetic polypeptide

SEQ ID NO: 1200 - DNA, 24 bp, Artificial Sequence
  Description of Artificial Sequence: Synthetic oligonucleotide
tcaggcggtggctcaggtccatgg

SEQ ID NO: 1201 - protein, 8 aa, Artificial Sequence
  Description of Artificial Sequence: Synthetic peptide
SGGGSGPW

SEQ ID NO: 1202 - DNA, 858 bp, Artificial Sequence; identical to SEQ ID NO: 1145
  Description of Artificial Sequence: Synthetic polynucleotide

SEQ ID NO: 1203 - protein, 286 aa, Artificial Sequence; identical to SEQ ID NO: 1146
  Description of Artificial Sequence: Synthetic polypeptide

SEQ ID NO: 1204 - DNA, 15 bp, Artificial Sequence
  Description of Artificial Sequence: Synthetic oligonucleotide
ggatctggaccgcgg

SEQ ID NO: 1205 - protein, 5 aa, Artificial Sequence
  Description of Artificial Sequence: Synthetic peptide
GSGPR

SEQ ID NO: 1206 - DNA, 54 bp, Artificial Sequence; identical to SEQ ID NO: 138
  Description of Artificial Sequence: Synthetic oligonucleotide

SEQ ID NO: 1207 - protein, 18 aa, Artificial Sequence
  Description of Artificial Sequence: Synthetic peptide
EGRGSLLTCGDVEENPGP

SEQ ID NO: 1208 - DNA, 6 bp, Artificial Sequence
  Description of Artificial Sequence: Synthetic oligonucleotide
ccatgg

SEQ ID NO: 1209 - protein, 2 aa, Artificial Sequence
  Description of Artificial Sequence: Synthetic peptide
PW

SEQ ID NO: 1210 - DNA, 63 bp, Artificial Sequence; identical to SEQ ID NO: 142
  Description of Artificial Sequence: Synthetic oligonucleotide

SEQ ID NO: 1211 - protein, 21 aa, Artificial Sequence
  Description of Artificial Sequence: Synthetic peptide
MEFGLSWLFLVAILKGVQCSR

SEQ ID NO: 1212 - DNA, 318 bp, Artificial Sequence; identical to SEQ ID NO: 1003
  Description of Artificial Sequence: Synthetic polynucleotide

SEQ ID NO: 1213 - protein, 106 aa, Artificial Sequence; identical to SEQ ID NO: 1004
  Description of Artificial Sequence: Synthetic polypeptide

SEQ ID NO: 1214 - DNA, 24 bp, Artificial Sequence
  Description of Artificial Sequence: Synthetic oligonucleotide
ggcggaggaagcggaggtgggggc

SEQ ID NO: 1215 - protein, 8 aa, Artificial Sequence
  Description of Artificial Sequence: Synthetic peptide
GGGSGGGG

SEQ ID NO: 1216 - DNA, 336 bp, Artificial Sequence; identical to SEQ ID NO: 1007
  Description of Artificial Sequence: Synthetic polynucleotide

SEQ ID NO: 1217 - protein, 112 aa, Artificial Sequence; identical to SEQ ID NO: 1008
  Description of Artificial Sequence: Synthetic polypeptide

SEQ ID NO: 1218 - DNA, 6 bp, Artificial Sequence
  Description of Artificial Sequence: Synthetic oligonucleotide
ggatcc

SEQ ID NO: 1219 - protein, 2 aa, Artificial Sequence
  Description of Artificial Sequence: Synthetic peptide
GS

SEQ ID NO: 1220 - DNA, 48 bp, Artificial Sequence; identical to SEQ ID NO: 152
  Description of Artificial Sequence: Synthetic oligonucleotide

SEQ ID NO: 1221 - protein, 16 aa, Artificial Sequence
  Description of Artificial Sequence: Synthetic peptide
ELPTQGTFSNVSTNVS

SEQ ID NO: 1222 - DNA, 126 bp, Artificial Sequence; identical to SEQ ID NO: 154
  Description of Artificial Sequence: Synthetic polynucleotide

SEQ ID NO: 1223 - protein, 42 aa, Artificial Sequence; identical to SEQ ID NO: 155
  Description of Artificial Sequence: Synthetic polypeptide

SEQ ID NO: 1224 - DNA, 111 bp, Artificial Sequence; identical to SEQ ID NO: 156
  Description of Artificial Sequence: Synthetic polynucleotide

SEQ ID NO: 1225 - protein, 37 aa, Artificial Sequence; identical to SEQ ID NO: 157
  Description of Artificial Sequence: Synthetic polypeptide

SEQ ID NO: 1226 - DNA, 6 bp, Artificial Sequence
  Description of Artificial Sequence: Synthetic oligonucleotide
gtcgac

SEQ ID NO: 1227 - protein, 2 aa, Artificial Sequence
  Description of Artificial Sequence: Synthetic peptide
VD

SEQ ID NO: 1228 - DNA, 336 bp, Artificial Sequence; identical to SEQ ID NO: 426
  Description of Artificial Sequence: Synthetic polynucleotide

SEQ ID NO: 1229 - protein, 112 aa, Artificial Sequence; identical to SEQ ID NO: 161
  Description of Artificial Sequence: Synthetic polypeptide

SEQ ID NO: 1230 - DNA, 18 bp, Artificial Sequence
  Description of Artificial Sequence: Synthetic oligonucleotide
ggaacgcgtggatcggga

SEQ ID NO: 1231 - protein, 6 aa, Artificial Sequence
  Description of Artificial Sequence: Synthetic peptide
GTRGSG

SEQ ID NO: 1232 - DNA, 57 bp, Artificial Sequence; identical to SEQ ID NO: 737
  Description of Artificial Sequence: Synthetic oligonucleotide

SEQ ID NO: 1233 - protein, 19 aa, Artificial Sequence
  Description of Artificial Sequence: Synthetic peptide
ATNFSLLKQAGDVEENPGP

SEQ ID NO: 1234 - DNA, 516 bp, Artificial Sequence; identical to SEQ ID NO: 251
  Description of Artificial Sequence: Synthetic polynucleotide

SEQ ID NO: 1235 - protein, 172 aa, Artificial Sequence; identical to SEQ ID NO: 240
  Description of Artificial Sequence: Synthetic polypeptide

SEQ ID NO: 1236 - DNA, 6 bp, Artificial Sequence
  Description of Artificial Sequence: Synthetic oligonucleotide
gtcgag

SEQ ID NO: 1237 - protein, 2 aa, Artificial Sequence
  Description of Artificial Sequence: Synthetic peptide
VE

SEQ ID NO: 1238 - DNA, 186 bp, Artificial Sequence; identical to SEQ ID NO: 255
  Description of Artificial Sequence: Synthetic polynucleotide

SEQ ID NO: 1239 - protein, 62 aa, Artificial Sequence; identical to SEQ ID NO: 216
  Description of Artificial Sequence: Synthetic polypeptide

SEQ ID NO: 1240 - DNA, 6 bp, Artificial Sequence
  Description of Artificial Sequence: Synthetic oligonucleotide
gtcgag

SEQ ID NO: 1241 - protein, 2 aa, Artificial Sequence
  Description of Artificial Sequence: Synthetic peptide
VE

SEQ ID NO: 1242 - DNA, 321 bp, Artificial Sequence; identical to SEQ ID NO: 761
  Description of Artificial Sequence: Synthetic polynucleotide

SEQ ID NO: 1243 - protein, 107 aa, Artificial Sequence; identical to SEQ ID NO: 3
  Description of Artificial Sequence: Synthetic polypeptide

SEQ ID NO: 1244 - DNA, 3 bp, Artificial Sequence
  Description of Artificial Sequence: Synthetic oligonucleotide
tga

SEQ ID NO: 1245 - DNA, 15 bp, Artificial Sequence
  Description of Artificial Sequence: Synthetic oligonucleotide
atgctcgagcaattg

SEQ ID NO: 1246 - protein, 5 aa, Artificial Sequence
  Description of Artificial Sequence: Synthetic peptide
MLEQL

SEQ ID NO: 1247 - DNA, 321 bp, Artificial Sequence; identical to SEQ ID NO: 928
  Description of Artificial Sequence: Synthetic polynucleotide

SEQ ID NO: 1248 - protein, 107 aa, Artificial Sequence; identical to SEQ ID NO: 929
  Description of Artificial Sequence: Synthetic polypeptide

SEQ ID NO: 1249 - DNA, 12 bp, Artificial Sequence
  Description of Artificial Sequence: Synthetic oligonucleotide
ggcgggcaattg

SEQ ID NO: 1250 - protein, 4 aa, Artificial Sequence
  Description of Artificial Sequence: Synthetic peptide
GGQL

SEQ ID NO: 1251 - DNA, 267 bp, Artificial Sequence; identical to SEQ ID NO: 932
  Description of Artificial Sequence: Synthetic polynucleotide

SEQ ID NO: 1252 - protein, 89 aa, Artificial Sequence; identical to SEQ ID NO: 933
  Description of Artificial Sequence: Synthetic polypeptide

SEQ ID NO: 1253 - DNA, 24 bp, Artificial Sequence
  Description of Artificial Sequence: Synthetic oligonucleotide
tcaggcggtggctcaggtccatgg

SEQ ID NO: 1254 - protein, 8 aa, Artificial Sequence
  Description of Artificial Sequence: Synthetic peptide
SGGGSGPW

SEQ ID NO: 1255 - DNA, 858 bp, Artificial Sequence; identical to SEQ ID NO: 1145
  Description of Artificial Sequence: Synthetic polynucleotide

SEQ ID NO: 1256 - protein, 286 aa, Artificial Sequence; identical to SEQ ID NO: 1146
  Description of Artificial Sequence: Synthetic polypeptide

SEQ ID NO: 1257 - DNA, 15 bp, Artificial Sequence
  Description of Artificial Sequence: Synthetic oligonucleotide
ggatctggaccgcgg

SEQ ID NO: 1258 - protein, 5 aa, Artificial Sequence
  Description of Artificial Sequence: Synthetic peptide
GSGPR

SEQ ID NO: 1259 - DNA, 54 bp, Artificial Sequence; identical to SEQ ID NO: 138
  Description of Artificial Sequence: Synthetic oligonucleotide

SEQ ID NO: 1260 - protein, 18 aa, Artificial Sequence
  Description of Artificial Sequence: Synthetic peptide
EGRGSLLTCGDVEENPGP

SEQ ID NO: 1261 - DNA, 6 bp, Artificial Sequence
  Description of Artificial Sequence: Synthetic oligonucleotide
ccatgg

SEQ ID NO: 1262 - protein, 2 aa, Artificial Sequence
  Description of Artificial Sequence: Synthetic peptide
PW

SEQ ID NO: 1263 - DNA, 63 bp, Artificial Sequence; identical to SEQ ID NO: 142
  Description of Artificial Sequence: Synthetic oligonucleotide

SEQ ID NO: 1264 - protein, 21 aa, Artificial Sequence
  Description of Artificial Sequence: Synthetic peptide
MEFGLSWLFLVAILKGVQCSR

SEQ ID NO: 1265 - DNA, 318 bp, Artificial Sequence; identical to SEQ ID NO: 1003
  Description of Artificial Sequence: Synthetic polynucleotide

SEQ ID NO: 1266 - protein, 106 aa, Artificial Sequence; identical to SEQ ID NO: 1004
  Description of Artificial Sequence: Synthetic polypeptide

SEQ ID NO: 1267 - DNA, 24 bp, Artificial Sequence
  Description of Artificial Sequence: Synthetic oligonucleotide
ggcggaggaagcggaggtgggggc

SEQ ID NO: 1268 - protein, 8 aa, Artificial Sequence
  Description of Artificial Sequence: Synthetic peptide
GGGSGGGG

SEQ ID NO: 1269 - DNA, 336 bp, Artificial Sequence; identical to SEQ ID NO: 1007
  Description of Artificial Sequence: Synthetic polynucleotide

SEQ ID NO: 1270 - protein, 112 aa, Artificial Sequence; identical to SEQ ID NO: 1008
  Description of Artificial Sequence: Synthetic polypeptide

SEQ ID NO: 1271 - DNA, 6 bp, Artificial Sequence
  Description of Artificial Sequence: Synthetic oligonucleotide
ggatcc

SEQ ID NO: 1272 - protein, 2 aa, Artificial Sequence
  Description of Artificial Sequence: Synthetic peptide
GS

SEQ ID NO: 1273 - DNA, 48 bp, Artificial Sequence; identical to SEQ ID NO: 152
  Description of Artificial Sequence: Synthetic oligonucleotide

SEQ ID NO: 1274 - protein, 16 aa, Artificial Sequence
  Description of Artificial Sequence: Synthetic peptide
ELPTQGTFSNVSTNVS

SEQ ID NO: 1275 - DNA, 126 bp, Artificial Sequence; identical to SEQ ID NO: 154
  Description of Artificial Sequence: Synthetic polynucleotide

SEQ ID NO: 1276 - protein, 42 aa, Artificial Sequence; identical to SEQ ID NO: 155
  Description of Artificial Sequence: Synthetic polypeptide

SEQ ID NO: 1277 - DNA, 111 bp, Artificial Sequence; identical to SEQ ID NO: 156
  Description of Artificial Sequence: Synthetic polynucleotide

SEQ ID NO: 1278 - protein, 37 aa, Artificial Sequence; identical to SEQ ID NO: 157
  Description of Artificial Sequence: Synthetic polypeptide

SEQ ID NO: 1279 - DNA, 6 bp, Artificial Sequence
  Description of Artificial Sequence: Synthetic oligonucleotide
gtcgac

SEQ ID NO: 1280 - protein, 2 aa, Artificial Sequence
  Description of Artificial Sequence: Synthetic peptide
VD

SEQ ID NO: 1281 - DNA, 336 bp, Artificial Sequence; identical to SEQ ID NO: 426
  Description of Artificial Sequence: Synthetic polynucleotide

SEQ ID NO: 1282 - protein, 112 aa, Artificial Sequence; identical to SEQ ID NO: 161
  Description of Artificial Sequence: Synthetic polypeptide

SEQ ID NO: 1283 - DNA, 57 bp, Artificial Sequence
  Description of Artificial Sequence: Synthetic oligonucleotide
gcaacgaatttttccctgctgaaacaggcaggggacgtagaggaaaatcctggtcct

SEQ ID NO: 1284 - protein, 19 aa, Artificial Sequence
  Description of Artificial Sequence: Synthetic peptide
ATNFSLLKQAGDVEENPGP

SEQ ID NO: 1285 - DNA, 516 bp, Artificial Sequence; identical to SEQ ID NO: 251
  Description of Artificial Sequence: Synthetic polynucleotide

SEQ ID NO: 1286 - protein, 172 aa, Artificial Sequence; identical to SEQ ID NO: 240
  Description of Artificial Sequence: Synthetic polypeptide

SEQ ID NO: 1287 - DNA, 6 bp, Artificial Sequence
  Description of Artificial Sequence: Synthetic oligonucleotide
gtcgag

SEQ ID NO: 1288 - protein, 2 aa, Artificial Sequence
  Description of Artificial Sequence: Synthetic peptide
VE

SEQ ID NO: 1289 - DNA, 186 bp, Artificial Sequence; identical to SEQ ID NO: 255
  Description of Artificial Sequence: Synthetic polynucleotide

SEQ ID NO: 1290 - protein, 62 aa, Artificial Sequence; identical to SEQ ID NO: 216
  Description of Artificial Sequence: Synthetic polypeptide

SEQ ID NO: 1291 - DNA, 3 bp, Artificial Sequence
  Description of Artificial Sequence: Synthetic oligonucleotide
tga

SEQ ID NO: 1292 - DNA, 15 bp, Artificial Sequence
  Description of Artificial Sequence: Synthetic oligonucleotide
atgctcgagcaattg

SEQ ID NO: 1293 - protein, 5 aa, Artificial Sequence
  Description of Artificial Sequence: Synthetic peptide
MLEQL

SEQ ID NO: 1294 - DNA, 321 bp, Artificial Sequence; identical to SEQ ID NO: 928
  Description of Artificial Sequence: Synthetic polynucleotide

SEQ ID NO: 1295 - protein, 107 aa, Artificial Sequence; identical to SEQ ID NO: 929
  Description of Artificial Sequence: Synthetic polypeptide

SEQ ID NO: 1296 - DNA, 12 bp, Artificial Sequence
  Description of Artificial Sequence: Synthetic oligonucleotide
ggcgggcaattg

SEQ ID NO: 1297 - protein, 4 aa, Artificial Sequence
  Description of Artificial Sequence: Synthetic peptide
GGQL

SEQ ID NO: 1298 - DNA, 267 bp, Artificial Sequence; identical to SEQ ID NO: 932
  Description of Artificial Sequence: Synthetic polynucleotide

SEQ ID NO: 1299 - protein, 89 aa, Artificial Sequence; identical to SEQ ID NO: 933
  Description of Artificial Sequence: Synthetic polypeptide

SEQ ID NO: 1300 - DNA, 24 bp, Artificial Sequence
  Description of Artificial Sequence: Synthetic oligonucleotide
tcaggcggtggctcaggtccatgg

SEQ ID NO: 1301 - protein, 8 aa, Artificial Sequence
  Description of Artificial Sequence: Synthetic peptide
SGGGSGPW

SEQ ID NO: 1302 - DNA, 858 bp, Artificial Sequence; identical to SEQ ID NO: 936
  Description of Artificial Sequence: Synthetic polynucleotide

SEQ ID NO: 1303 - protein, 286 aa, Artificial Sequence; identical to SEQ ID NO: 937
  Description of Artificial Sequence: Synthetic polypeptide

SEQ ID NO: 1304 - DNA, 15 bp, Artificial Sequence
  Description of Artificial Sequence: Synthetic oligonucleotide
ggatctggaccgcgg

SEQ ID NO: 1305 - protein, 5 aa, Artificial Sequence
  Description of Artificial Sequence: Synthetic peptide
GSGPR

SEQ ID NO: 1306 - DNA, 54 bp, Artificial Sequence; identical to SEQ ID NO: 138
  Description of Artificial Sequence: Synthetic oligonucleotide

SEQ ID NO: 1307 - protein, 18 aa, Artificial Sequence
  Description of Artificial Sequence: Synthetic peptide
EGRGSLLTCGDVEENPGP

SEQ ID NO: 1308 - DNA, 6 bp, Artificial Sequence
  Description of Artificial Sequence: Synthetic oligonucleotide
ccatgg

SEQ ID NO: 1309 - protein, 2 aa, Artificial Sequence
  Description of Artificial Sequence: Synthetic peptide
PW

SEQ ID NO: 1310 - DNA, 63 bp, Artificial Sequence; identical to SEQ ID NO: 142
  Description of Artificial Sequence: Synthetic oligonucleotide

SEQ ID NO: 1311 - protein, 21 aa, Artificial Sequence
  Description of Artificial Sequence: Synthetic peptide
MEFGLSWLFLVAILKGVQCSR

SEQ ID NO: 1312 - DNA, 318 bp, Artificial Sequence; identical to SEQ ID NO: 1003
  Description of Artificial Sequence: Synthetic polynucleotide

SEQ ID NO: 1313 - protein, 106 aa, Artificial Sequence; identical to SEQ ID NO: 1004
  Description of Artificial Sequence: Synthetic polypeptide

SEQ ID NO: 1314 - DNA, 24 bp, Artificial Sequence
  Description of Artificial Sequence: Synthetic oligonucleotide
ggcggaggaagcggaggtgggggc

SEQ ID NO: 1315 - protein, 8 aa, Artificial Sequence
  Description of Artificial Sequence: Synthetic peptide
GGGSGGGG

SEQ ID NO: 1316 - DNA, 336 bp, Artificial Sequence; identical to SEQ ID NO: 1007
  Description of Artificial Sequence: Synthetic polynucleotide

SEQ ID NO: 1317 - protein, 112 aa, Artificial Sequence; identical to SEQ ID NO: 1008
  Description of Artificial Sequence: Synthetic polypeptide

SEQ ID NO: 1318 - DNA, 6 bp, Artificial Sequence
  Description of Artificial Sequence: Synthetic oligonucleotide
ggatcc

SEQ ID NO: 1319 - protein, 2 aa, Artificial Sequence
  Description of Artificial Sequence: Synthetic peptide
GS

SEQ ID NO: 1320 - DNA, 48 bp, Artificial Sequence; identical to SEQ ID NO: 152
  Description of Artificial Sequence: Synthetic oligonucleotide

SEQ ID NO: 1321 - protein, 16 aa, Artificial Sequence
  Description of Artificial Sequence: Synthetic peptide
ELPTQGTFSNVSTNVS

SEQ ID NO: 1322 - DNA, 126 bp, Artificial Sequence; identical to SEQ ID NO: 154
  Description of Artificial Sequence: Synthetic polynucleotide

SEQ ID NO: 1323 - protein, 42 aa, Artificial Sequence; identical to SEQ ID NO: 155
  Description of Artificial Sequence: Synthetic polypeptide

SEQ ID NO: 1324 - DNA, 111 bp, Artificial Sequence; identical to SEQ ID NO: 156
  Description of Artificial Sequence: Synthetic polynucleotide

SEQ ID NO: 1325 - protein, 37 aa, Artificial Sequence; identical to SEQ ID NO: 157
  Description of Artificial Sequence: Synthetic polypeptide

SEQ ID NO: 1326 - DNA, 6 bp, Artificial Sequence
  Description of Artificial Sequence: Synthetic oligonucleotide
gtcgac

SEQ ID NO: 1327 - protein, 2 aa, Artificial Sequence
  Description of Artificial Sequence: Synthetic peptide
VD

SEQ ID NO: 1328 - DNA, 336 bp, Artificial Sequence; identical to SEQ ID NO: 426
  Description of Artificial Sequence: Synthetic polynucleotide

SEQ ID NO: 1329 - protein, 112 aa, Artificial Sequence; identical to SEQ ID NO: 161
  Description of Artificial Sequence: Synthetic polypeptide

SEQ ID NO: 1330 - DNA, 18 bp, Artificial Sequence
  Description of Artificial Sequence: Synthetic oligonucleotide
ggaacgcgtggatcggga

SEQ ID NO: 1331 - protein, 6 aa, Artificial Sequence
  Description of Artificial Sequence: Synthetic peptide
GTRGSG

SEQ ID NO: 1332 - DNA, 57 bp, Artificial Sequence; identical to SEQ ID NO: 737
  Description of Artificial Sequence: Synthetic oligonucleotide

SEQ ID NO: 1333 - protein, 19 aa, Artificial Sequence
  Description of Artificial Sequence: Synthetic peptide
ATNFSLLKQAGDVEENPGP

SEQ ID NO: 1334 - DNA, 516 bp, Artificial Sequence; identical to SEQ ID NO: 251
  Description of Artificial Sequence: Synthetic polynucleotide

SEQ ID NO: 1335 - protein, 172 aa, Artificial Sequence; identical to SEQ ID NO: 240
  Description of Artificial Sequence: Synthetic polypeptide

SEQ ID NO: 1336 - DNA, 6 bp, Artificial Sequence
  Description of Artificial Sequence: Synthetic oligonucleotide
gtcgag

SEQ ID NO: 1337 - protein, 2 aa, Artificial Sequence
  Description of Artificial Sequence: Synthetic peptide
VE

SEQ ID NO: 1338 - DNA, 186 bp, Artificial Sequence; identical to SEQ ID NO: 255
  Description of Artificial Sequence: Synthetic polynucleotide

SEQ ID NO: 1339 - protein, 62 aa, Artificial Sequence; identical to SEQ ID NO: 216
  Description of Artificial Sequence: Synthetic polypeptide

SEQ ID NO: 1340 - DNA, 6 bp, Artificial Sequence
  Description of Artificial Sequence: Synthetic oligonucleotide
gtcgag

SEQ ID NO: 1341 - protein, 2 aa, Artificial Sequence
  Description of Artificial Sequence: Synthetic peptide
VE

SEQ ID NO: 1342 - DNA, 321 bp, Artificial Sequence; identical to SEQ ID NO: 757
  Description of Artificial Sequence: Synthetic polynucleotide

SEQ ID NO: 1343 - protein, 107 aa, Artificial Sequence; identical to SEQ ID NO: 3
  Description of Artificial Sequence: Synthetic polypeptide

SEQ ID NO: 1344 - DNA, 6 bp, Artificial Sequence
  Description of Artificial Sequence: Synthetic oligonucleotide
gtcgag

SEQ ID NO: 1345 - protein, 2 aa, Artificial Sequence
  Description of Artificial Sequence: Synthetic peptide
VE

SEQ ID NO: 1346 - DNA, 321 bp, Artificial Sequence
  Description of Artificial Sequence: Synthetic polynucleotide
ggagtgcaggtggagactatctccccaggagacgggcgcaccttccccaagcgcggccagacctgcgtggtgcactacaccgggatgcttgaagatggaaagaaatttgattcctcccgggacagaaacaagccctttaagtttatgctaggcaagcaggaggtgatccgaggctgggaagaaggggttgcccagatgagtgtgggtcagagagccaaactgactatatctccagattatgcctatggtgccactgggcacccaggcatcatcccaccacatgccactctcgtcttcgatgtggagcttctaaaactggaa

SEQ ID NO: 1347 - protein, 107 aa, Artificial Sequence; identical to SEQ ID NO: 929
  Description of Artificial Sequence: Synthetic polypeptide

SEQ ID NO: 1348 - DNA, 3 bp, Artificial Sequence
  Description of Artificial Sequence: Synthetic oligonucleotide
tga

SEQ ID NO: 1349 - DNA, 516 bp, Artificial Sequence; identical to SEQ ID NO: 251
  Description of Artificial Sequence: Synthetic polynucleotide

SEQ ID NO: 1350 - protein, 172 aa, Artificial Sequence; identical to SEQ ID NO: 240
  Description of Artificial Sequence: Synthetic polypeptide

SEQ ID NO: 1351 - DNA, 6 bp, Artificial Sequence
  Description of Artificial Sequence: Synthetic oligonucleotide
gtcgag

SEQ ID NO: 1352 - protein, 2 aa, Artificial Sequence
  Description of Artificial Sequence: Synthetic peptide
VE

SEQ ID NO: 1353 - DNA, 186 bp, Artificial Sequence; identical to SEQ ID NO: 255
  Description of Artificial Sequence: Synthetic polynucleotide

SEQ ID NO: 1354 - protein, 62 aa, Artificial Sequence; identical to SEQ ID NO: 216
  Description of Artificial Sequence: Synthetic polypeptide

SEQ ID NO: 1355 - DNA, 15 bp, Artificial Sequence
  Description of Artificial Sequence: Synthetic oligonucleotide
ggatctggaccgcgg

SEQ ID NO: 1356 - protein, 5 aa, Artificial Sequence
  Description of Artificial Sequence: Synthetic peptide
GSGPR

SEQ ID NO: 1357 - DNA, 54 bp, Artificial Sequence; identical to SEQ ID NO: 138
  Description of Artificial Sequence: Synthetic oligonucleotide

SEQ ID NO: 1358 - protein, 18 aa, Artificial Sequence
  Description of Artificial Sequence: Synthetic peptide
EGRGSLLTCGDVEENPGP

SEQ ID NO: 1359 - DNA, 6 bp, Artificial Sequence
  Description of Artificial Sequence: Synthetic oligonucleotide
ccacgg

SEQ ID NO: 1360 - protein, 2 aa, Artificial Sequence
  Description of Artificial Sequence: Synthetic peptide
PR

SEQ ID NO: 1361 - DNA, 63 bp, Artificial Sequence; identical to SEQ ID NO: 142
  Description of Artificial Sequence: Synthetic oligonucleotide

SEQ ID NO: 1362 - protein, 21 aa, Artificial Sequence
  Description of Artificial Sequence: Synthetic peptide
MEFGLSWLFLVAILKGVQCSR

SEQ ID NO: 1363 - DNA, 321 bp, Artificial Sequence; identical to SEQ ID NO: 144
  Description of Artificial Sequence: Synthetic polynucleotide

SEQ ID NO: 1364 - protein, 107 aa, Artificial Sequence; identical to SEQ ID NO: 145
  Description of Artificial Sequence: Synthetic polypeptide

SEQ ID NO: 1365 - DNA, 24 bp, Artificial Sequence
  Description of Artificial Sequence: Synthetic oligonucleotide
ggcggaggaagcggaggtgggggc

SEQ ID NO: 1366 - protein, 8 aa, Artificial Sequence
  Description of Artificial Sequence: Synthetic peptide
GGGSGGGG

SEQ ID NO: 1367 - DNA, 360 bp, Artificial Sequence; identical to SEQ ID NO: 148
  Description of Artificial Sequence: Synthetic polynucleotide

SEQ ID NO: 1368 - protein, 120 aa, Artificial Sequence; identical to SEQ ID NO: 149
  Description of Artificial Sequence: Synthetic polypeptide

SEQ ID NO: 1369 - DNA, 6 bp, Artificial Sequence
  Description of Artificial Sequence: Synthetic oligonucleotide
ggatcc

SEQ ID NO: 1370 - protein, 2 aa, Artificial Sequence
  Description of Artificial Sequence: Synthetic peptide
GS

SEQ ID NO: 1371 - DNA, 48 bp, Artificial Sequence; identical to SEQ ID NO: 152
  Description of Artificial Sequence: Synthetic oligonucleotide

SEQ ID NO: 1372 - protein, 16 aa, Artificial Sequence
  Description of Artificial Sequence: Synthetic peptide
ELPTQGTFSNVSTNVS

SEQ ID NO: 1373 - DNA, 126 bp, Artificial Sequence; identical to SEQ ID NO: 154
  Description of Artificial Sequence: Synthetic polynucleotide

SEQ ID NO: 1374 - protein, 42 aa, Artificial Sequence; identical to SEQ ID NO: 155
  Description of Artificial Sequence: Synthetic polypeptide

SEQ ID NO: 1375 - DNA, 111 bp, Artificial Sequence; identical to SEQ ID NO: 156
  Description of Artificial Sequence: Synthetic polynucleotide

SEQ ID NO: 1376 - protein, 37 aa, Artificial Sequence; identical to SEQ ID NO: 157
  Description of Artificial Sequence: Synthetic polypeptide

SEQ ID NO: 1377 - DNA, 6 bp, Artificial Sequence
  Description of Artificial Sequence: Synthetic oligonucleotide
gtcgac

SEQ ID NO: 1378 - protein, 2 aa, Artificial Sequence
  Description of Artificial Sequence: Synthetic peptide
VD

SEQ ID NO: 1379 - DNA, 336 bp, Artificial Sequence; identical to SEQ ID NO: 426
  Description of Artificial Sequence: Synthetic polynucleotide

SEQ ID NO: 1380 - protein, 112 aa, Artificial Sequence; identical to SEQ ID NO: 161
  Description of Artificial Sequence: Synthetic polypeptide

SEQ ID NO: 1381 - DNA, 42 bp, Artificial Sequence; identical to SEQ ID NO: 247
  Description of Artificial Sequence: Synthetic oligonucleotide

SEQ ID NO: 1382 - protein, 14 aa, Artificial Sequence
  Description of Artificial Sequence: Synthetic peptide
MGSSKSKPKDPSQR

SEQ ID NO: 1383 - DNA, 516 bp, Artificial Sequence; identical to SEQ ID NO: 251
  Description of Artificial Sequence: Synthetic polynucleotide

SEQ ID NO: 1384 - protein, 172 aa, Artificial Sequence; identical to SEQ ID NO: 240
  Description of Artificial Sequence: Synthetic polypeptide

SEQ ID NO: 1385 - DNA, 6 bp, Artificial Sequence
  Description of Artificial Sequence: Synthetic oligonucleotide
gtcgag

SEQ ID NO: 1386 - protein, 2 aa, Artificial Sequence
  Description of Artificial Sequence: Synthetic peptide
VE

SEQ ID NO: 1387 - DNA, 186 bp, Artificial Sequence; identical to SEQ ID NO: 255
  Description of Artificial Sequence: Synthetic polynucleotide

SEQ ID NO: 1388 - protein, 62 aa, Artificial Sequence; identical to SEQ ID NO: 216
  Description of Artificial Sequence: Synthetic polypeptide

SEQ ID NO: 1389 - DNA, 15 bp, Artificial Sequence
  Description of Artificial Sequence: Synthetic oligonucleotide
ggatctggaccgcgg

SEQ ID NO: 1390 - protein, 5 aa, Artificial Sequence
  Description of Artificial Sequence: Synthetic peptide
GSGPR

SEQ ID NO: 1391 - DNA, 54 bp, Artificial Sequence; identical to SEQ ID NO: 138
  Description of Artificial Sequence: Synthetic oligonucleotide

SEQ ID NO: 1392 - protein, 18 aa, Artificial Sequence
  Description of Artificial Sequence: Synthetic peptide
EGRGSLLTCGDVEENPGP

SEQ ID NO: 1393 - DNA, 6 bp, Artificial Sequence
  Description of Artificial Sequence: Synthetic oligonucleotide
ccacgg

SEQ ID NO: 1394 - protein, 2 aa, Artificial Sequence
  Description of Artificial Sequence: Synthetic peptide
PR

SEQ ID NO: 1395 - DNA, 63 bp, Artificial Sequence; identical to SEQ ID NO: 142
  Description of Artificial Sequence: Synthetic oligonucleotide

SEQ ID NO: 1396 - protein, 21 aa, Artificial Sequence
  Description of Artificial Sequence: Synthetic peptide
MEFGLSWLFLVAILKGVQCSR

SEQ ID NO: 1397 - DNA, 321 bp, Artificial Sequence; identical to SEQ ID NO: 144
  Description of Artificial Sequence: Synthetic polynucleotide

SEQ ID NO: 1398 - protein, 107 aa, Artificial Sequence; identical to SEQ ID NO: 145
  Description of Artificial Sequence: Synthetic polypeptide

SEQ ID NO: 1399 - DNA, 24 bp, Artificial Sequence
  Description of Artificial Sequence: Synthetic oligonucleotide
ggcggaggaagcggaggtgggggc

SEQ ID NO: 1400 - protein, 8 aa, Artificial Sequence
  Description of Artificial Sequence: Synthetic peptide
GGGSGGGG

SEQ ID NO: 1401 - DNA, 360 bp, Artificial Sequence; identical to SEQ ID NO: 148
  Description of Artificial Sequence: Synthetic polynucleotide

SEQ ID NO: 1402 - protein, 120 aa, Artificial Sequence; identical to SEQ ID NO: 149
  Description of Artificial Sequence: Synthetic polypeptide

SEQ ID NO: 1403 - DNA, 6 bp, Artificial Sequence
  Description of Artificial Sequence: Synthetic oligonucleotide
ggatcc

SEQ ID NO: 1404 - protein, 2 aa, Artificial Sequence
  Description of Artificial Sequence: Synthetic peptide
GS

SEQ ID NO: 1405 - DNA, 48 bp, Artificial Sequence; identical to SEQ ID NO: 152
  Description of Artificial Sequence: Synthetic oligonucleotide

SEQ ID NO: 1406 - protein, 16 aa, Artificial Sequence
  Description of Artificial Sequence: Synthetic peptide
ELPTQGTFSNVSTNVS

SEQ ID NO: 1407 - DNA, 126 bp, Artificial Sequence; identical to SEQ ID NO: 154
  Description of Artificial Sequence: Synthetic polynucleotide

SEQ ID NO: 1408 - protein, 42 aa, Artificial Sequence; identical to SEQ ID NO: 155
  Description of Artificial Sequence: Synthetic polypeptide

SEQ ID NO: 1409 - DNA, 111 bp, Artificial Sequence; identical to SEQ ID NO: 156
  Description of Artificial Sequence: Synthetic polynucleotide

SEQ ID NO: 1410 - protein, 37 aa, Artificial Sequence; identical to SEQ ID NO: 157
  Description of Artificial Sequence: Synthetic polypeptide

SEQ ID NO: 1411 - DNA, 6 bp, Artificial Sequence
  Description of Artificial Sequence: Synthetic oligonucleotide
gtcgac

SEQ ID NO: 1412 - protein, 2 aa, Artificial Sequence
  Description of Artificial Sequence: Synthetic peptide
VD

SEQ ID NO: 1413 - DNA, 336 bp, Artificial Sequence; identical to SEQ ID NO: 426
  Description of Artificial Sequence: Synthetic polynucleotide

SEQ ID NO: 1414 - protein, 112 aa, Artificial Sequence; identical to SEQ ID NO: 161
  Description of Artificial Sequence: Synthetic polypeptide

SEQ ID NO: 1415 - DNA, 63 bp, Artificial Sequence; identical to SEQ ID NO: 142
  Description of Artificial Sequence: Synthetic oligonucleotide

SEQ ID NO: 1416 - protein, 21 aa, Artificial Sequence
  Description of Artificial Sequence: Synthetic peptide
MEFGLSWLFLVAILKGVQCSR

SEQ ID NO: 1417 - DNA, 321 bp, Artificial Sequence; identical to SEQ ID NO: 144
  Description of Artificial Sequence: Synthetic polynucleotide

SEQ ID NO: 1418 - protein, 107 aa, Artificial Sequence; identical to SEQ ID NO: 145
  Description of Artificial Sequence: Synthetic polypeptide

SEQ ID NO: 1419 - DNA, 24 bp, Artificial Sequence
  Description of Artificial Sequence: Synthetic oligonucleotide
ggcggaggaagcggaggtgggggc

SEQ ID NO: 1420 - protein, 8 aa, Artificial Sequence
  Description of Artificial Sequence: Synthetic peptide
GGGSGGGG

SEQ ID NO: 1421 - DNA, 360 bp, Artificial Sequence; identical to SEQ ID NO: 148
  Description of Artificial Sequence: Synthetic polynucleotide

SEQ ID NO: 1422 - protein, 120 aa, Artificial Sequence; identical to SEQ ID NO: 149
  Description of Artificial Sequence: Synthetic polypeptide

SEQ ID NO: 1423 - DNA, 6 bp, Artificial Sequence
  Description of Artificial Sequence: Synthetic oligonucleotide
ggatcc

SEQ ID NO: 1424 - protein, 2 aa, Artificial Sequence
  Description of Artificial Sequence: Synthetic peptide
GS

SEQ ID NO: 1425 - DNA, 48 bp, Artificial Sequence; identical to SEQ ID NO: 152
  Description of Artificial Sequence: Synthetic oligonucleotide

SEQ ID NO: 1426 - protein, 16 aa, Artificial Sequence
  Description of Artificial Sequence: Synthetic peptide
ELPTQGTFSNVSTNVS

SEQ ID NO: 1427 - DNA, 126 bp, Artificial Sequence; identical to SEQ ID NO: 154
  Description of Artificial Sequence: Synthetic polynucleotide

SEQ ID NO: 1428 - protein, 42 aa, Artificial Sequence; identical to SEQ ID NO: 155
  Description of Artificial Sequence: Synthetic polypeptide

SEQ ID NO: 1429 - DNA, 111 bp, Artificial Sequence; identical to SEQ ID NO: 156
  Description of Artificial Sequence: Synthetic polynucleotide

SEQ ID NO: 1430 - protein, 37 aa, Artificial Sequence; identical to SEQ ID NO: 157
  Description of Artificial Sequence: Synthetic polypeptide

SEQ ID NO: 1431 - DNA, 6 bp, Artificial Sequence
  Description of Artificial Sequence: Synthetic oligonucleotide
gtcgac

SEQ ID NO: 1432 - protein, 2 aa, Artificial Sequence
  Description of Artificial Sequence: Synthetic peptide
VD

SEQ ID NO: 1433 - DNA, 336 bp, Artificial Sequence; identical to SEQ ID NO: 426
  Description of Artificial Sequence: Synthetic polynucleotide

SEQ ID NO: 1434 - protein, 112 aa, Artificial Sequence; identical to SEQ ID NO: 161
  Description of Artificial Sequence: Synthetic polypeptide

SEQ ID NO: 1435 - DNA, 57 bp, Artificial Sequence; identical to SEQ ID NO: 737
  Description of Artificial Sequence: Synthetic oligonucleotide

SEQ ID NO: 1436 - protein, 19 aa, Artificial Sequence
  Description of Artificial Sequence: Synthetic peptide
ATNFSLLKQAGDVEENPGP

SEQ ID NO: 1437 - DNA, 516 bp, Artificial Sequence; identical to SEQ ID NO: 251
  Description of Artificial Sequence: Synthetic polynucleotide

SEQ ID NO: 1438 - protein, 172 aa, Artificial Sequence; identical to SEQ ID NO: 240
  Description of Artificial Sequence: Synthetic polypeptide

SEQ ID NO: 1439 - DNA, 6 bp, Artificial Sequence
  Description of Artificial Sequence: Synthetic oligonucleotide
gtcgag

SEQ ID NO: 1440 - protein, 2 aa, Artificial Sequence
  Description of Artificial Sequence: Synthetic peptide
VE

SEQ ID NO: 1441 - DNA, 186 bp, Artificial Sequence; identical to SEQ ID NO: 255
  Description of Artificial Sequence: Synthetic polynucleotide

SEQ ID NO: 1442 - protein, 62 aa, Artificial Sequence; identical to SEQ ID NO: 216
  Description of Artificial Sequence: Synthetic polypeptide

SEQ ID NO: 1443 - DNA, 63 bp, Artificial Sequence; identical to SEQ ID NO: 142
  Description of Artificial Sequence: Synthetic oligonucleotide

SEQ ID NO: 1444 - protein, 21 aa, Artificial Sequence
  Description of Artificial Sequence: Synthetic peptide
MEFGLSWLFLVAILKGVQCSR

SEQ ID NO: 1445 - DNA, 321 bp, Artificial Sequence; identical to SEQ ID NO: 144
  Description of Artificial Sequence: Synthetic polynucleotide

SEQ ID NO: 1446 - protein, 107 aa, Artificial Sequence; identical to SEQ ID NO: 145
  Description of Artificial Sequence: Synthetic polypeptide

SEQ ID NO: 1447 - DNA, 24 bp, Artificial Sequence
  Description of Artificial Sequence: Synthetic oligonucleotide
ggcggaggaagcggaggtgggggc

SEQ ID NO: 1448 - protein, 8 aa, Artificial Sequence
  Description of Artificial Sequence: Synthetic peptide
GGGSGGGG

SEQ ID NO: 1449 - DNA, 360 bp, Artificial Sequence; identical to SEQ ID NO: 148
  Description of Artificial Sequence: Synthetic polynucleotide

SEQ ID NO: 1450 - protein, 120 aa, Artificial Sequence; identical to SEQ ID NO: 149
  Description of Artificial Sequence: Synthetic polypeptide

SEQ ID NO: 1451 - DNA, 6 bp, Artificial Sequence
  Description of Artificial Sequence: Synthetic oligonucleotide
ggatcc

SEQ ID NO: 1452 - protein, 2 aa, Artificial Sequence
  Description of Artificial Sequence: Synthetic peptide
GS

SEQ ID NO: 1453 - DNA, 48 bp, Artificial Sequence; identical to SEQ ID NO: 152
  Description of Artificial Sequence: Synthetic oligonucleotide

SEQ ID NO: 1454 - protein, 16 aa, Artificial Sequence
  Description of Artificial Sequence: Synthetic peptide
ELPTQGTFSNVSTNVS

SEQ ID NO: 1455 - DNA, 126 bp, Artificial Sequence; identical to SEQ ID NO: 154
  Description of Artificial Sequence: Synthetic polynucleotide

SEQ ID NO: 1456 - protein, 42 aa, Artificial Sequence; identical to SEQ ID NO: 155
  Description of Artificial Sequence: Synthetic polypeptide

SEQ ID NO: 1457 - DNA, 111 bp, Artificial Sequence; identical to SEQ ID NO: 156
  Description of Artificial Sequence: Synthetic polynucleotide

SEQ ID NO: 1458 - protein, 37 aa, Artificial Sequence; identical to SEQ ID NO: 157
  Description of Artificial Sequence: Synthetic polypeptide

SEQ ID NO: 1459 - DNA, 6 bp, Artificial Sequence
  Description of Artificial Sequence: Synthetic oligonucleotide
gtcgac

SEQ ID NO: 1460 - protein, 2 aa, Artificial Sequence
  Description of Artificial Sequence: Synthetic peptide
VD

SEQ ID NO: 1461 - DNA, 336 bp, Artificial Sequence; identical to SEQ ID NO: 426
  Description of Artificial Sequence: Synthetic polynucleotide

SEQ ID NO: 1462 - protein, 112 aa, Artificial Sequence; identical to SEQ ID NO: 161
  Description of Artificial Sequence: Synthetic polypeptide

SEQ ID NO: 1463 - DNA, 57 bp, Artificial Sequence; identical to SEQ ID NO: 737
  Description of Artificial Sequence: Synthetic oligonucleotide

SEQ ID NO: 1464 - protein, 19 aa, Artificial Sequence
  Description of Artificial Sequence: Synthetic peptide
ATNFSLLKQAGDVEENPGP

SEQ ID NO: 1465 - DNA, 516 bp, Artificial Sequence; identical to SEQ ID NO: 251
  Description of Artificial Sequence: Synthetic polynucleotide

SEQ ID NO: 1466 - protein, 172 aa, Artificial Sequence; identical to SEQ ID NO: 240
  Description of Artificial Sequence: Synthetic polypeptide

SEQ ID NO: 1467 - DNA, 6 bp, Artificial Sequence
  Description of Artificial Sequence: Synthetic oligonucleotide
gtcgag

SEQ ID NO: 1468 - protein, 2 aa, Artificial Sequence
  Description of Artificial Sequence: Synthetic peptide
VE

SEQ ID NO: 1469 - DNA, 186 bp, Artificial Sequence; identical to SEQ ID NO: 255
  Description of Artificial Sequence: Synthetic polynucleotide

SEQ ID NO: 1470 - protein, 62 aa, Artificial Sequence; identical to SEQ ID NO: 216
  Description of Artificial Sequence: Synthetic polypeptide

SEQ ID NO: 1471 - DNA, 321 bp, Artificial Sequence; identical to SEQ ID NO: 757
  Description of Artificial Sequence: Synthetic polynucleotide

SEQ ID NO: 1472 - protein, 107 aa, Artificial Sequence; identical to SEQ ID NO: 3
  Description of Artificial Sequence: Synthetic polypeptide

SEQ ID NO: 1473 - DNA, 6 bp, Artificial Sequence
  Description of Artificial Sequence: Synthetic oligonucleotide
gtcgag

SEQ ID NO: 1474 - protein, 2 aa, Artificial Sequence
  Description of Artificial Sequence: Synthetic peptide
VE

SEQ ID NO: 1475 - DNA, 321 bp, Artificial Sequence; identical to SEQ ID NO: 761
  Description of Artificial Sequence: Synthetic polynucleotide

SEQ ID NO: 1476 - protein, 107 aa, Artificial Sequence; identical to SEQ ID NO: 3
  Description of Artificial Sequence: Synthetic polypeptide

SEQ ID NO: 1477 - DNA, 516 bp, Artificial Sequence; identical to SEQ ID NO: 251
  Description of Artificial Sequence: Synthetic polynucleotide

SEQ ID NO: 1478 - protein, 172 aa, Artificial Sequence; identical to SEQ ID NO: 240
  Description of Artificial Sequence: Synthetic polypeptide

SEQ ID NO: 1479 - DNA, 6 bp, Artificial Sequence
  Description of Artificial Sequence: Synthetic oligonucleotide
gtcgag

SEQ ID NO: 1480 - protein, 2 aa, Artificial Sequence
  Description of Artificial Sequence: Synthetic peptide
VE

SEQ ID NO: 1481 - DNA, 186 bp, Artificial Sequence; identical to SEQ ID NO: 255
  Description of Artificial Sequence: Synthetic polynucleotide

SEQ ID NO: 1482 - protein, 62 aa, Artificial Sequence; identical to SEQ ID NO: 216
  Description of Artificial Sequence: Synthetic polypeptide

SEQ ID NO: 1483 - DNA, 15 bp, Artificial Sequence
  Description of Artificial Sequence: Synthetic oligonucleotide
ggatctggaccgcgg

SEQ ID NO: 1484 - protein, 5 aa, Artificial Sequence
  Description of Artificial Sequence: Synthetic peptide
GSGPR

SEQ ID NO: 1485 - DNA, 54 bp, Artificial Sequence; identical to SEQ ID NO: 138
  Description of Artificial Sequence: Synthetic oligonucleotide

SEQ ID NO: 1486 - protein, 18 aa, Artificial Sequence
  Description of Artificial Sequence: Synthetic peptide
EGRGSLLTCGDVEENPGP

SEQ ID NO: 1487 - DNA, 6 bp, Artificial Sequence
  Description of Artificial Sequence: Synthetic oligonucleotide
ccacgg

SEQ ID NO: 1488 - protein, 2 aa, Artificial Sequence
  Description of Artificial Sequence: Synthetic peptide
PR

SEQ ID NO: 1489 - DNA, 63 bp, Artificial Sequence; identical to SEQ ID NO: 142
  Description of Artificial Sequence: Synthetic oligonucleotide

SEQ ID NO: 1490 - protein, 21 aa, Artificial Sequence
  Description of Artificial Sequence: Synthetic peptide
MEFGLSWLFLVAILKGVQCSR

SEQ ID NO: 1491 - DNA, 321 bp, Artificial Sequence; identical to SEQ ID NO: 144
  Description of Artificial Sequence: Synthetic polynucleotide

SEQ ID NO: 1492 - protein, 107 aa, Artificial Sequence; identical to SEQ ID NO: 145
  Description of Artificial Sequence: Synthetic polypeptide

SEQ ID NO: 1493 - DNA, 24 bp, Artificial Sequence
  Description of Artificial Sequence: Synthetic oligonucleotide
ggcggaggaagcggaggtgggggc

SEQ ID NO: 1494 - protein, 8 aa, Artificial Sequence
  Description of Artificial Sequence: Synthetic peptide
GGGSGGGG

SEQ ID NO: 1495 - DNA, 360 bp, Artificial Sequence; identical to SEQ ID NO: 148
  Description of Artificial Sequence: Synthetic polynucleotide

SEQ ID NO: 1496 - protein, 120 aa, Artificial Sequence; identical to SEQ ID NO: 149
  Description of Artificial Sequence: Synthetic polypeptide

SEQ ID NO: 1497 - DNA, 6 bp, Artificial Sequence
  Description of Artificial Sequence: Synthetic oligonucleotide
ggatcc

SEQ ID NO: 1498 - protein, 2 aa, Artificial Sequence
  Description of Artificial Sequence: Synthetic peptide
GS

SEQ ID NO: 1499 - DNA, 48 bp, Artificial Sequence; identical to SEQ ID NO: 152
  Description of Artificial Sequence: Synthetic oligonucleotide

SEQ ID NO: 1500 - protein, 16 aa, Artificial Sequence
  Description of Artificial Sequence: Synthetic peptide
ELPTQGTFSNVSTNVS

SEQ ID NO: 1501 - DNA, 126 bp, Artificial Sequence; identical to SEQ ID NO: 154
  Description of Artificial Sequence: Synthetic polynucleotide

SEQ ID NO: 1502 - protein, 42 aa, Artificial Sequence; identical to SEQ ID NO: 155
  Description of Artificial Sequence: Synthetic polypeptide

SEQ ID NO: 1503 - DNA, 111 bp, Artificial Sequence; identical to SEQ ID NO: 156
  Description of Artificial Sequence: Synthetic polynucleotide

SEQ ID NO: 1504 - protein, 37 aa, Artificial Sequence; identical to SEQ ID NO: 157
  Description of Artificial Sequence: Synthetic polypeptide

SEQ ID NO: 1505 - DNA, 6 bp, Artificial Sequence
  Description of Artificial Sequence: Synthetic oligonucleotide
gtcgac

SEQ ID NO: 1506 - protein, 2 aa, Artificial Sequence
  Description of Artificial Sequence: Synthetic peptide
VD

SEQ ID NO: 1507 - DNA, 336 bp, Artificial Sequence; identical to SEQ ID NO: 426
  Description of Artificial Sequence: Synthetic polynucleotide

SEQ ID NO: 1508 - protein, 112 aa, Artificial Sequence; identical to SEQ ID NO: 161
  Description of Artificial Sequence: Synthetic polypeptide

SEQ ID NO: 1509 - DNA, 516 bp, Artificial Sequence; identical to SEQ ID NO: 251
  Description of Artificial Sequence: Synthetic polynucleotide

SEQ ID NO: 1510 - protein, 172 aa, Artificial Sequence; identical to SEQ ID NO: 240
  Description of Artificial Sequence: Synthetic polypeptide

SEQ ID NO: 1511 - DNA, 6 bp, Artificial Sequence
  Description of Artificial Sequence: Synthetic oligonucleotide
gtcgag

SEQ ID NO: 1512 - protein, 2 aa, Artificial Sequence
  Description of Artificial Sequence: Synthetic peptide
VE

SEQ ID NO: 1513 - DNA, 186 bp, Artificial Sequence; identical to SEQ ID NO: 255
  Description of Artificial Sequence: Synthetic polynucleotide

SEQ ID NO: 1514 - protein, 62 aa, Artificial Sequence; identical to SEQ ID NO: 216
  Description of Artificial Sequence: Synthetic polypeptide

SEQ ID NO: 1515 - DNA, 6 bp, Artificial Sequence
  Description of Artificial Sequence: Synthetic oligonucleotide
gtcgag

SEQ ID NO: 1516 - protein, 2 aa, Artificial Sequence
  Description of Artificial Sequence: Synthetic peptide
VE

SEQ ID NO: 1517 - DNA, 321 bp, Artificial Sequence; identical to SEQ ID NO: 317
  Description of Artificial Sequence: Synthetic polynucleotide

SEQ ID NO: 1518 - protein, 107 aa, Artificial Sequence; identical to SEQ ID NO: 3
  Description of Artificial Sequence: Synthetic polypeptide

SEQ ID NO: 1519 - DNA, 15 bp, Artificial Sequence
  Description of Artificial Sequence: Synthetic oligonucleotide
ggatctggaccgcgg

SEQ ID NO: 1520 - protein, 5 aa, Artificial Sequence
  Description of Artificial Sequence: Synthetic peptide
GSGPR

SEQ ID NO: 1521 - DNA, 54 bp, Artificial Sequence; identical to SEQ ID NO: 138
  Description of Artificial Sequence: Synthetic oligonucleotide

SEQ ID NO: 1522 - protein, 18 aa, Artificial Sequence
  Description of Artificial Sequence: Synthetic peptide
EGRGSLLTCGDVEENPGP

SEQ ID NO: 1523 - DNA, 6 bp, Artificial Sequence
  Description of Artificial Sequence: Synthetic oligonucleotide
ccacgg

SEQ ID NO: 1524 - protein, 2 aa, Artificial Sequence
  Description of Artificial Sequence: Synthetic peptide
PR

SEQ ID NO: 1525 - DNA, 63 bp, Artificial Sequence; identical to SEQ ID NO: 142
  Description of Artificial Sequence: Synthetic oligonucleotide

SEQ ID NO: 1526 - protein, 21 aa, Artificial Sequence
  Description of Artificial Sequence: Synthetic peptide
MEFGLSWLFLVAILKGVQCSR

SEQ ID NO: 1527 - DNA, 321 bp, Artificial Sequence; identical to SEQ ID NO: 144
  Description of Artificial Sequence: Synthetic polynucleotide

SEQ ID NO: 1528 - protein, 107 aa, Artificial Sequence; identical to SEQ ID NO: 145
  Description of Artificial Sequence: Synthetic polypeptide

SEQ ID NO: 1529 - DNA, 24 bp, Artificial Sequence
  Description of Artificial Sequence: Synthetic oligonucleotide
ggcggaggaagcggaggtgggggc

SEQ ID NO: 1530 - protein, 8 aa, Artificial Sequence
  Description of Artificial Sequence: Synthetic peptide
GGGSGGGG

SEQ ID NO: 1531 - DNA, 360 bp, Artificial Sequence; identical to SEQ ID NO: 148
  Description of Artificial Sequence: Synthetic polynucleotide

SEQ ID NO: 1532 - protein, 120 aa, Artificial Sequence; identical to SEQ ID NO: 149
  Description of Artificial Sequence: Synthetic polypeptide

SEQ ID NO: 1533 - DNA, 6 bp, Artificial Sequence
  Description of Artificial Sequence: Synthetic oligonucleotide
ggatcc

SEQ ID NO: 1534 - protein, 2 aa, Artificial Sequence
  Description of Artificial Sequence: Synthetic peptide
GS

SEQ ID NO: 1535 - DNA, 48 bp, Artificial Sequence; identical to SEQ ID NO: 152
  Description of Artificial Sequence: Synthetic oligonucleotide

SEQ ID NO: 1536 - protein, 16 aa, Artificial Sequence
  Description of Artificial Sequence: Synthetic peptide
ELPTQGTFSNVSTNVS

SEQ ID NO: 1537 - DNA, 126 bp, Artificial Sequence; identical to SEQ ID NO: 154
  Description of Artificial Sequence: Synthetic polynucleotide

SEQ ID NO: 1538 - protein, 42 aa, Artificial Sequence; identical to SEQ ID NO: 155
  Description of Artificial Sequence: Synthetic polypeptide

SEQ ID NO: 1539 - DNA, 111 bp, Artificial Sequence; identical to SEQ ID NO: 156
  Description of Artificial Sequence: Synthetic polynucleotide

SEQ ID NO: 1540 - protein, 37 aa, Artificial Sequence; identical to SEQ ID NO: 157
  Description of Artificial Sequence: Synthetic polypeptide

SEQ ID NO: 1541 - DNA, 6 bp, Artificial Sequence
  Description of Artificial Sequence: Synthetic oligonucleotide
gtcgac

SEQ ID NO: 1542 - protein, 2 aa, Artificial Sequence
  Description of Artificial Sequence: Synthetic peptide
VD

SEQ ID NO: 1543 - DNA, 336 bp, Artificial Sequence; identical to SEQ ID NO: 426
  Description of Artificial Sequence: Synthetic polynucleotide

SEQ ID NO: 1544 - protein, 112 aa, Artificial Sequence; identical to SEQ ID NO: 161
  Description of Artificial Sequence: Synthetic polypeptide

SEQ ID NO: 1545 - DNA, 516 bp, Artificial Sequence; identical to SEQ ID NO: 251
  Description of Artificial Sequence: Synthetic polynucleotide

SEQ ID NO: 1546 - protein, 172 aa, Artificial Sequence; identical to SEQ ID NO: 240
  Description of Artificial Sequence: Synthetic polypeptide

SEQ ID NO: 1547 - DNA, 6 bp, Artificial Sequence
  Description of Artificial Sequence: Synthetic oligonucleotide
gtcgag

SEQ ID NO: 1548 - protein, 2 aa, Artificial Sequence
  Description of Artificial Sequence: Synthetic peptide
VE

SEQ ID NO: 1549 - DNA, 186 bp, Artificial Sequence; identical to SEQ ID NO: 255
  Description of Artificial Sequence: Synthetic polynucleotide

SEQ ID NO: 1550 - protein, 62 aa, Artificial Sequence; identical to SEQ ID NO: 216
  Description of Artificial Sequence: Synthetic polypeptide

SEQ ID NO: 1551 - DNA, 6 bp, Artificial Sequence
  Description of Artificial Sequence: Synthetic oligonucleotide
gtcgag

SEQ ID NO: 1552 - protein, 2 aa, Artificial Sequence
  Description of Artificial Sequence: Synthetic peptide
VE

SEQ ID NO: 1553 - DNA, 321 bp, Artificial Sequence
  Description of Artificial Sequence: Synthetic polynucleotide
ggcgtccaagtcgaaaccattagtcccggcgatggcagaacatttcctacaaggggacaaacatgtgtcgtccattatacaggcatgttggaggacggcaaaaagttcgacagtagtagagatcgcaataaacctttcaaattcatgttgggaaaacaagaagtcattaggggatgggaggagggcgtggctcaaatgtccgtcggccaacgcgctaagctcaccatcagccccgactacgcatacggcgctaccggacatcccggaattattccccctcacgctaccttggtgtttgacgtcgaactgttgaagctcgaa

SEQ ID NO: 1554 - protein, 107 aa, Artificial Sequence; identical to SEQ ID NO: 929
  Description of Artificial Sequence: Synthetic polypeptide

SEQ ID NO: 1555 - DNA, 6 bp, Artificial Sequence
  Description of Artificial Sequence: Synthetic oligonucleotide
gtcgag

SEQ ID NO: 1556 - protein, 2 aa, Artificial Sequence
  Description of Artificial Sequence: Synthetic peptide
VE

SEQ ID NO: 1557 - DNA, 273 bp, Artificial Sequence
  Description of Artificial Sequence: Synthetic polynucleotide
caattggaaatgtggcatgaagggttggaagaagcttcaaggctgtacttcggagagaggaacgtgaagggcatgtttgaggttcttgaacctctgcacgccatgatggaacggggaccgcagacactgaaagaaacctcttttaatcaggcctacggcagagacctgatggaggcccaagaatggtgtagaaagtatatgaaatccggtaacgtgaaagacctgctccaggcctgggacctttattaccatgtgttcaggcggatcagtaag

SEQ ID NO: 1558 - protein, 91 aa, Artificial Sequence
  Description of Artificial Sequence: Synthetic polypeptide
QLEMWHEGLEEASRLYFGERNVKGMFEVLEPLHAMMERGPQTLKETSFNQAYGRDLMEAQEWCRKYMKSGNVKDLLQAWDLYYHVFRRISK

SEQ ID NO: 1559 - DNA, 9 bp, Artificial Sequence
  Description of Artificial Sequence: Synthetic oligonucleotide
ggctcaggt

SEQ ID NO: 1560 - protein, 3 aa, Artificial Sequence
  Description of Artificial Sequence: Synthetic peptide
GSG

SEQ ID NO: 1561 - DNA, 54 bp, Artificial Sequence; identical to SEQ ID NO: 138
  Description of Artificial Sequence: Synthetic oligonucleotide

SEQ ID NO: 1562 - protein, 18 aa, Artificial Sequence
  Description of Artificial Sequence: Synthetic peptide
EGRGSLLTCGDVEENPGP

SEQ ID NO: 1563 - DNA, 6 bp, Artificial Sequence
  Description of Artificial Sequence: Synthetic oligonucleotide
ccacgg

SEQ ID NO: 1564 - protein, 2 aa, Artificial Sequence
  Description of Artificial Sequence: Synthetic peptide
PR

SEQ ID NO: 1565 - DNA, 63 bp, Artificial Sequence; identical to SEQ ID NO: 142
  Description of Artificial Sequence: Synthetic oligonucleotide

SEQ ID NO: 1566 - protein, 21 aa, Artificial Sequence
  Description of Artificial Sequence: Synthetic peptide
MEFGLSWLFLVAILKGVQCSR

SEQ ID NO: 1567 - DNA, 321 bp, Artificial Sequence; identical to SEQ ID NO: 144
  Description of Artificial Sequence: Synthetic polynucleotide

SEQ ID NO: 1568 - protein, 107 aa, Artificial Sequence; identical to SEQ ID NO: 145
  Description of Artificial Sequence: Synthetic polypeptide

SEQ ID NO: 1569 - DNA, 24 bp, Artificial Sequence
  Description of Artificial Sequence: Synthetic oligonucleotide
ggcggaggaagcggaggtgggggc

SEQ ID NO: 1570 - protein, 8 aa, Artificial Sequence
  Description of Artificial Sequence: Synthetic peptide
GGGSGGGG

SEQ ID NO: 1571 - DNA, 360 bp, Artificial Sequence; identical to SEQ ID NO: 148
  Description of Artificial Sequence: Synthetic polynucleotide

SEQ ID NO: 1572 - protein, 120 aa, Artificial Sequence; identical to SEQ ID NO: 149
  Description of Artificial Sequence: Synthetic polypeptide

SEQ ID NO: 1573 - DNA, 6 bp, Artificial Sequence
  Description of Artificial Sequence: Synthetic oligonucleotide
ggatcc

SEQ ID NO: 1574 - protein, 2 aa, Artificial Sequence
  Description of Artificial Sequence: Synthetic peptide
GS

SEQ ID NO: 1575 - DNA, 48 bp, Artificial Sequence; identical to SEQ ID NO: 152
  Description of Artificial Sequence: Synthetic oligonucleotide

SEQ ID NO: 1576 - protein, 16 aa, Artificial Sequence
  Description of Artificial Sequence: Synthetic peptide
ELPTQGTFSNVSTNVS

SEQ ID NO: 1577 - DNA, 126 bp, Artificial Sequence; identical to SEQ ID NO: 154
  Description of Artificial Sequence: Synthetic polynucleotide

SEQ ID NO: 1578 - protein, 42 aa, Artificial Sequence; identical to SEQ ID NO: 155
  Description of Artificial Sequence: Synthetic polypeptide

SEQ ID NO: 1579 - DNA, 111 bp, Artificial Sequence; identical to SEQ ID NO: 156
  Description of Artificial Sequence: Synthetic polynucleotide

SEQ ID NO: 1580 - protein, 37 aa, Artificial Sequence; identical to SEQ ID NO: 157
  Description of Artificial Sequence: Synthetic polypeptide

SEQ ID NO: 1581 - DNA, 6 bp, Artificial Sequence
  Description of Artificial Sequence: Synthetic oligonucleotide
gtcgac

SEQ ID NO: 1582 - protein, 2 aa, Artificial Sequence
  Description of Artificial Sequence: Synthetic peptide
VD

SEQ ID NO: 1583 - DNA, 336 bp, Artificial Sequence; identical to SEQ ID NO: 426
  Description of Artificial Sequence: Synthetic polynucleotide

SEQ ID NO: 1584 - protein, 112 aa, Artificial Sequence; identical to SEQ ID NO: 161
  Description of Artificial Sequence: Synthetic polypeptide

SEQ ID NO: 1585 - DNA, 9 bp, Artificial Sequence
  Description of Artificial Sequence: Synthetic oligonucleotide
ggttccgga

SEQ ID NO: 1586 - protein, 3 aa, Artificial Sequence
  Description of Artificial Sequence: Synthetic peptide
GSG

SEQ ID NO: 1587 - DNA, 54 bp, Artificial Sequence; identical to SEQ ID NO: 138
  Description of Artificial Sequence: Synthetic oligonucleotide

SEQ ID NO: 1588 - protein, 18 aa, Artificial Sequence
  Description of Artificial Sequence: Synthetic peptide
EGRGSLLTCGDVEENPGP

SEQ ID NO: 1589 - DNA, 9 bp, Artificial Sequence
  Description of Artificial Sequence: Synthetic oligonucleotide
ggatctgga

SEQ ID NO: 1590 - protein, 3 aa, Artificial Sequence
  Description of Artificial Sequence: Synthetic peptide
GSG

SEQ ID NO: 1591 - DNA, 57 bp, Artificial Sequence; identical to SEQ ID NO: 1283
  Description of Artificial Sequence: Synthetic oligonucleotide

SEQ ID NO: 1592 - protein, 19 aa, Artificial Sequence
  Description of Artificial Sequence: Synthetic peptide
ATNFSLLKQAGDVEENPGP

SEQ ID NO: 1593 - DNA, 516 bp, Artificial Sequence; identical to SEQ ID NO: 251
  Description of Artificial Sequence: Synthetic polynucleotide

SEQ ID NO: 1594 - protein, 172 aa, Artificial Sequence; identical to SEQ ID NO: 240
  Description of Artificial Sequence: Synthetic polypeptide

SEQ ID NO: 1595 - DNA, 6 bp, Artificial Sequence
  Description of Artificial Sequence: Synthetic oligonucleotide
gtcgag

SEQ ID NO: 1596 - protein, 2 aa, Artificial Sequence
  Description of Artificial Sequence: Synthetic peptide
VE

SEQ ID NO: 1597 - DNA, 186 bp, Artificial Sequence; identical to SEQ ID NO: 255
  Description of Artificial Sequence: Synthetic polynucleotide

SEQ ID NO: 1598 - protein, 62 aa, Artificial Sequence; identical to SEQ ID NO: 216
  Description of Artificial Sequence: Synthetic polypeptide

SEQ ID NO: 1599 - DNA, 6 bp, Artificial Sequence
  Description of Artificial Sequence: Synthetic oligonucleotide
gtcgag

SEQ ID NO: 1600 - protein, 2 aa, Artificial Sequence
  Description of Artificial Sequence: Synthetic peptide
VE

SEQ ID NO: 1601 - DNA, 6 bp, Artificial Sequence
  Description of Artificial Sequence: Synthetic oligonucleotide
gtcgag

SEQ ID NO: 1602 - protein, 2 aa, Artificial Sequence
  Description of Artificial Sequence: Synthetic peptide
VE

SEQ ID NO: 1603 - DNA, 27 bp, Artificial Sequence
  Description of Artificial Sequence: Synthetic oligonucleotide
tcaggcggtggctcaggtccgcggtga

SEQ ID NO: 1604 - protein, 8 aa, Artificial Sequence
  Description of Artificial Sequence: Synthetic peptide
SGGGSGPR

SEQ ID NO: 1605 - DNA, 18 bp, Artificial Sequence
  Description of Artificial Sequence: Synthetic oligonucleotide
atgctcgagcaattggag

SEQ ID NO: 1606 - protein, 6 aa, Artificial Sequence
  Description of Artificial Sequence: Synthetic peptide
MLEQLE

SEQ ID NO: 1607 - DNA, 321 bp, Artificial Sequence; identical to SEQ ID NO: 317
  Description of Artificial Sequence: Synthetic polynucleotide

SEQ ID NO: 1608 - protein, 107 aa, Artificial Sequence; identical to SEQ ID NO: 3
  Description of Artificial Sequence: Synthetic polypeptide

SEQ ID NO: 1609 - DNA, 24 bp, Artificial Sequence
  Description of Artificial Sequence: Synthetic oligonucleotide
tcaggcggtggctcaggtgtggac

SEQ ID NO: 1610 - protein, 8 aa, Artificial Sequence
  Description of Artificial Sequence: Synthetic peptide
SGGGSGVD

SEQ ID NO: 1611 - DNA, 858 bp, Artificial Sequence; identical to SEQ ID NO: 936
  Description of Artificial Sequence: Synthetic polynucleotide

SEQ ID NO: 1612 - protein, 286 aa, Artificial Sequence; identical to SEQ ID NO: 937
  Description of Artificial Sequence: Synthetic polypeptide

SEQ ID NO: 1613 - DNA, 15 bp, Artificial Sequence
  Description of Artificial Sequence: Synthetic oligonucleotide
ggatctggaccgcgg

SEQ ID NO: 1614 - protein, 5 aa, Artificial Sequence
  Description of Artificial Sequence: Synthetic peptide
GSGPR

SEQ ID NO: 1615 - DNA, 54 bp, Artificial Sequence; identical to SEQ ID NO: 138
  Description of Artificial Sequence: Synthetic oligonucleotide

SEQ ID NO: 1616 - protein, 18 aa, Artificial Sequence
  Description of Artificial Sequence: Synthetic peptide
EGRGSLLTCGDVEENPGP

SEQ ID NO: 1617 - DNA, 6 bp, Artificial Sequence
  Description of Artificial Sequence: Synthetic oligonucleotide
ccacgg

SEQ ID NO: 1618 - protein, 2 aa, Artificial Sequence
  Description of Artificial Sequence: Synthetic peptide
PR

SEQ ID NO: 1619 - DNA, 63 bp, Artificial Sequence; identical to SEQ ID NO: 142
  Description of Artificial Sequence: Synthetic oligonucleotide

SEQ ID NO: 1620 - protein, 21 aa, Artificial Sequence
  Description of Artificial Sequence: Synthetic peptide
MEFGLSWLFLVAILKGVQCSR

SEQ ID NO: 1621 - DNA, 321 bp, Artificial Sequence; identical to SEQ ID NO: 144
  Description of Artificial Sequence: Synthetic polynucleotide

SEQ ID NO: 1622 - protein, 107 aa, Artificial Sequence; identical to SEQ ID NO: 145
  Description of Artificial Sequence: Synthetic polypeptide

SEQ ID NO: 1623 - DNA, 24 bp, Artificial Sequence
  Description of Artificial Sequence: Synthetic oligonucleotide
ggcggaggaagcggaggtgggggc

SEQ ID NO: 1624 - protein, 8 aa, Artificial Sequence
  Description of Artificial Sequence: Synthetic peptide
GGGSGGGG

SEQ ID NO: 1625 - DNA, 360 bp, Artificial Sequence; identical to SEQ ID NO: 148
  Description of Artificial Sequence: Synthetic polynucleotide

SEQ ID NO: 1626 - protein, 120 aa, Artificial Sequence; identical to SEQ ID NO: 149
  Description of Artificial Sequence: Synthetic polypeptide

SEQ ID NO: 1627 - DNA, 6 bp, Artificial Sequence
  Description of Artificial Sequence: Synthetic oligonucleotide
ggatcc

SEQ ID NO: 1628 - protein, 2 aa, Artificial Sequence
  Description of Artificial Sequence: Synthetic peptide
GS

SEQ ID NO: 1629 - DNA, 48 bp, Artificial Sequence; identical to SEQ ID NO: 152
  Description of Artificial Sequence: Synthetic oligonucleotide

SEQ ID NO: 1630 - protein, 16 aa, Artificial Sequence
  Description of Artificial Sequence: Synthetic peptide
ELPTQGTFSNVSTNVS

SEQ ID NO: 1631 - DNA, 126 bp, Artificial Sequence; identical to SEQ ID NO: 154
  Description of Artificial Sequence: Synthetic polynucleotide

SEQ ID NO: 1632 - protein, 42 aa, Artificial Sequence; identical to SEQ ID NO: 155
  Description of Artificial Sequence: Synthetic polypeptide

SEQ ID NO: 1633 - DNA, 111 bp, Artificial Sequence; identical to SEQ ID NO: 156
  Description of Artificial Sequence: Synthetic polynucleotide

SEQ ID NO: 1634 - protein, 37 aa, Artificial Sequence; identical to SEQ ID NO: 157
  Description of Artificial Sequence: Synthetic polypeptide

SEQ ID NO: 1635 - DNA, 6 bp, Artificial Sequence
  Description of Artificial Sequence: Synthetic oligonucleotide
gtcgac

SEQ ID NO: 1636 - protein, 2 aa, Artificial Sequence
  Description of Artificial Sequence: Synthetic peptide
VD

SEQ ID NO: 1637 - DNA, 336 bp, Artificial Sequence; identical to SEQ ID NO: 426
  Description of Artificial Sequence: Synthetic polynucleotide

SEQ ID NO: 1638 - protein, 112 aa, Artificial Sequence; identical to SEQ ID NO: 161
  Description of Artificial Sequence: Synthetic polypeptide

SEQ ID NO: 1639 - DNA, 9 bp, Artificial Sequence
  Description of Artificial Sequence: Synthetic oligonucleotide
ggttccgga

SEQ ID NO: 1640 - protein, 3 aa, Artificial Sequence
  Description of Artificial Sequence: Synthetic peptide
GSG

SEQ ID NO: 1641 - DNA, 54 bp, Artificial Sequence; identical to SEQ ID NO: 138
  Description of Artificial Sequence: Synthetic oligonucleotide

SEQ ID NO: 1642 - protein, 18 aa, Artificial Sequence
  Description of Artificial Sequence: Synthetic peptide
EGRGSLLTCGDVEENPGP

SEQ ID NO: 1643 - DNA, 9 bp, Artificial Sequence
  Description of Artificial Sequence: Synthetic oligonucleotide
ggatctgga

SEQ ID NO: 1644 - protein, 3 aa, Artificial Sequence
  Description of Artificial Sequence: Synthetic peptide
GSG

SEQ ID NO: 1645 - DNA, 57 bp, Artificial Sequence; identical to SEQ ID NO: 1283
  Description of Artificial Sequence: Synthetic oligonucleotide

SEQ ID NO: 1646 - protein, 19 aa, Artificial Sequence
  Description of Artificial Sequence: Synthetic peptide
ATNFSLLKQAGDVEENPGP

SEQ ID NO: 1647 - DNA, 516 bp, Artificial Sequence; identical to SEQ ID NO: 251
  Description of Artificial Sequence: Synthetic polynucleotide

SEQ ID NO: 1648 - protein, 172 aa, Artificial Sequence; identical to SEQ ID NO: 240
  Description of Artificial Sequence: Synthetic polypeptide

SEQ ID NO: 1649 - DNA, 6 bp, Artificial Sequence
  Description of Artificial Sequence: Synthetic oligonucleotide
gtcgag

SEQ ID NO: 1650 - protein, 2 aa, Artificial Sequence
  Description of Artificial Sequence: Synthetic peptide
VE

SEQ ID NO: 1651 - DNA, 186 bp, Artificial Sequence; identical to SEQ ID NO: 255
  Description of Artificial Sequence: Synthetic polynucleotide

SEQ ID NO: 1652 - protein, 62 aa, Artificial Sequence; identical to SEQ ID NO: 216
  Description of Artificial Sequence: Synthetic polypeptide

SEQ ID NO: 1653 - DNA, 6 bp, Artificial Sequence
  Description of Artificial Sequence: Synthetic oligonucleotide
gtcgag

SEQ ID NO: 1654 - protein, 2 aa, Artificial Sequence
  Description of Artificial Sequence: Synthetic peptide
VE

SEQ ID NO: 1655 - DNA, 321 bp, Artificial Sequence; identical to SEQ ID NO: 1553
  Description of Artificial Sequence: Synthetic polynucleotide

SEQ ID NO: 1656 - protein, 107 aa, Artificial Sequence; identical to SEQ ID NO: 929
  Description of Artificial Sequence: Synthetic polypeptide

SEQ ID NO: 1657 - DNA, 6 bp, Artificial Sequence
  Description of Artificial Sequence: Synthetic oligonucleotide
gtcgag

SEQ ID NO: 1658 - protein, 2 aa, Artificial Sequence
  Description of Artificial Sequence: Synthetic peptide
VE

SEQ ID NO: 1659 - DNA, 273 bp, Artificial Sequence; identical to SEQ ID NO: 1557
  Description of Artificial Sequence: Synthetic polynucleotide

SEQ ID NO: 1660 - protein, 91 aa, Artificial Sequence; identical to SEQ ID NO: 1558
  Description of Artificial Sequence: Synthetic polypeptide

SEQ ID NO: 1661 - DNA, 27 bp, Artificial Sequence
  Description of Artificial Sequence: Synthetic oligonucleotide
tcaggcggtggctcaggtccgcggtga

SEQ ID NO: 1662 - protein, 8 aa, Artificial Sequence
  Description of Artificial Sequence: Synthetic peptide
SGGGSGPR

SEQ ID NO: 1663 - DNA, 516 bp, Artificial Sequence; identical to SEQ ID NO: 251
  Description of Artificial Sequence: Synthetic polynucleotide

SEQ ID NO: 1664 - protein, 172 aa, Artificial Sequence; identical to SEQ ID NO: 240
  Description of Artificial Sequence: Synthetic polypeptide

SEQ ID NO: 1665 - DNA, 6 bp, Artificial Sequence
  Description of Artificial Sequence: Synthetic oligonucleotide
gtcgag

SEQ ID NO: 1666 - protein, 2 aa, Artificial Sequence
  Description of Artificial Sequence: Synthetic peptide
VE

SEQ ID NO: 1667 - DNA, 186 bp, Artificial Sequence; identical to SEQ ID NO: 255
  Description of Artificial Sequence: Synthetic polynucleotide

SEQ ID NO: 1668 - protein, 62 aa, Artificial Sequence; identical to SEQ ID NO: 216
  Description of Artificial Sequence: Synthetic polypeptide

SEQ ID NO: 1669 - DNA, 6 bp, Artificial Sequence
  Description of Artificial Sequence: Synthetic oligonucleotide
gtcgag

SEQ ID NO: 1670 - protein, 2 aa, Artificial Sequence
  Description of Artificial Sequence: Synthetic peptide
VE

SEQ ID NO: 1671 - DNA, 321 bp, Artificial Sequence; identical to SEQ ID NO: 757
  Description of Artificial Sequence: Synthetic polynucleotide

SEQ ID NO: 1672 - protein, 107 aa, Artificial Sequence; identical to SEQ ID NO: 3
  Description of Artificial Sequence: Synthetic polypeptide

SEQ ID NO: 1673 - DNA, 6 bp, Artificial Sequence
  Description of Artificial Sequence: Synthetic oligonucleotide
gtcgag

SEQ ID NO: 1674 - protein, 2 aa, Artificial Sequence
  Description of Artificial Sequence: Synthetic peptide
VE

SEQ ID NO: 1675 - DNA, 321 bp, Artificial Sequence; identical to SEQ ID NO: 761
  Description of Artificial Sequence: Synthetic polynucleotide

SEQ ID NO: 1676 - protein, 107 aa, Artificial Sequence; identical to SEQ ID NO: 3
  Description of Artificial Sequence: Synthetic polypeptide

SEQ ID NO: 1677 - DNA, 6 bp, Artificial Sequence
  Description of Artificial Sequence: Synthetic oligonucleotide
ccgcgg

SEQ ID NO: 1678 - protein, 2 aa, Artificial Sequence
  Description of Artificial Sequence: Synthetic peptide
PR

SEQ ID NO: 1679 - DNA, 54 bp, Artificial Sequence
  Description of Artificial Sequence: Synthetic oligonucleotide
gagggcagaggcagcctcctgacatgtggggacgtcgaggagaaccctggccca

SEQ ID NO: 1680 - protein, 18 aa, Artificial Sequence
  Description of Artificial Sequence: Synthetic peptide
EGRGSLLTCGDVEENPGP

SEQ ID NO: 1681 - DNA, 6 bp, Artificial Sequence
  Description of Artificial Sequence: Synthetic oligonucleotide
ccttgg

SEQ ID NO: 1682 - protein, 2 aa, Artificial Sequence
  Description of Artificial Sequence: Synthetic peptide
PW

SEQ ID NO: 1683 - DNA, 63 bp, Artificial Sequence
  Description of Artificial Sequence: Synthetic oligonucleotide
atggagttcggattgagctggctgttcctggtggcaatactcaagggcgttcaatgttcacgg

SEQ ID NO: 1684 - protein, 21 aa, Artificial Sequence
  Description of Artificial Sequence: Synthetic peptide
MEFGLSWLFLVAILKGVQCSR

SEQ ID NO: 1685 - DNA, 339 bp, Artificial Sequence
  Description of Artificial Sequence: Synthetic polynucleotide
gaaattgtgctgactcagagcccgggtagcctggccgtgtcccccggagagcgagtgaccatgagctgtaaatccagccaatcagtttttttttcatcatctcaaaaaaactatctggcatggtaccaacagatacccgggcagtccccacggctgctgatttactgggcatcaacacgcgagagcggtgtgcccgacagattcaccggaagcgggagcggcacggacttcacacttaccatctcaagcgtacaaccggaggacttggctatctattactgccaccaatatctttcctccagaacattcggacagggaacgaaactggagatcaaaaga

SEQ ID NO: 1686 - protein, 113 aa, Artificial Sequence
  Description of Artificial Sequence: Synthetic polypeptide
EIVLTQSPGSLAVSPGERVTMSCKSSQSVFFSSSQKNYLAWYQQIPGQSPRLLIYWASTRESGVPDRFTGSGSGTDFTLTISSVQPEDLAIYYCHQYLSSRTFGQGTKLEIKR

SEQ ID NO: 1687 - DNA, 24 bp, Artificial Sequence
  Description of Artificial Sequence: Synthetic oligonucleotide
ggcggcgggagtgggggaggaggt

SEQ ID NO: 1688 - protein, 8 aa, Artificial Sequence
  Description of Artificial Sequence: Synthetic peptide
GGGSGGGG

SEQ ID NO: 1689 - DNA, 6 bp, Artificial Sequence
  Description of Artificial Sequence: Synthetic oligonucleotide
caggtg

SEQ ID NO: 1690 - protein, 2 aa, Artificial Sequence
  Description of Artificial Sequence: Synthetic peptide
QV

SEQ ID NO: 1691 - DNA, 354 bp, Artificial Sequence
  Description of Artificial Sequence: Synthetic polynucleotide
caggtgcagctgcagcagcctggagccgaggtggtgaagcccggcgcatctgtgaaaatgtcttgcaaggcaagcggatatacatttactagctactacatccattggatcaagcaaacccccggacagggcctcgaatgggtgggagttatttacccggggaacgatgatatctcttataatcagaaattccaagggaaagccaccctgactgcagacaaatcaagtaccacagcctatatgcagctcagctccctgacaagcgaggattccgctgtgtactactgtgccagggaggttagacttcgatattttgatgtttgggggcagggaactaccgtgaccgtgagcagc

SEQ ID NO: 1692 - protein, 118 aa, Artificial Sequence
  Description of Artificial Sequence: Synthetic polypeptide
QVQLQQPGAEVVKPGASVKMSCKASGYTFTSYYIHWIKQTPGQGLEWVGVIYPGNDDISYNQKFQGKATLTADKSSTTAYMQLSSLTSEDSAVYYCAREVRLRYFDVWGQGTTVTVSS

SEQ ID NO: 1693 - DNA, 6 bp, Artificial Sequence
  Description of Artificial Sequence: Synthetic oligonucleotide
ggctcc

SEQ ID NO: 1694 - protein, 2 aa, Artificial Sequence
  Description of Artificial Sequence: Synthetic peptide
GS

SEQ ID NO: 1695 - DNA, 48 bp, Artificial Sequence
  Description of Artificial Sequence: Synthetic oligonucleotide
gagctgccaacccagggaactttttcaaatgtatcaactaacgtctca

SEQ ID NO: 1696 - protein, 16 aa, Artificial Sequence
  Description of Artificial Sequence: Synthetic peptide
ELPTQGTFSNVSTNVS

SEQ ID NO: 1697 - DNA, 126 bp, Artificial Sequence
  Description of Artificial Sequence: Synthetic polynucleotide
cccgcgccacgaccaccaacaccagccccaaccattgcatcccagcctttgtctctccggcccgaggcttgtcgccccgccgccgggggtgccgtccatacccgaggcctggacttcgcctgcgat

SEQ ID NO: 1698 - protein, 42 aa, Artificial Sequence; identical to SEQ ID NO: 155
  Description of Artificial Sequence: Synthetic polypeptide

SEQ ID NO: 1699 - DNA, 111 bp, Artificial Sequence
  Description of Artificial Sequence: Synthetic polynucleotide
atatatatttgggctcctctggccggtacctgcggcgtactgctcctgtcactggtaataaccctgtattgcaatcacaggaacagaaggagagtctgtaagtgcccccgc

SEQ ID NO: 1700 - protein, 37 aa, Artificial Sequence; identical to SEQ ID NO: 157
  Description of Artificial Sequence: Synthetic polypeptide

SEQ ID NO: 1701 - DNA, 6 bp, Artificial Sequence
  Description of Artificial Sequence: Synthetic oligonucleotide
gtcgac

SEQ ID NO: 1702 - protein, 2 aa, Artificial Sequence
  Description of Artificial Sequence: Synthetic peptide
VD

SEQ ID NO: 1703 - DNA, 336 bp, Artificial Sequence; identical to SEQ ID NO: 426
  Description of Artificial Sequence: Synthetic polynucleotide

SEQ ID NO: 1704 - protein, 112 aa, Artificial Sequence; identical to SEQ ID NO: 161
  Description of Artificial Sequence: Synthetic polypeptide

SEQ ID NO: 1705 - DNA, 3 bp, Artificial Sequence
  Description of Artificial Sequence: Synthetic oligonucleotide
tga

SEQ ID NO: 1706 - DNA, 516 bp, Artificial Sequence; identical to SEQ ID NO: 251
  Description of Artificial Sequence: Synthetic polynucleotide

SEQ ID NO: 1707 - protein, 172 aa, Artificial Sequence; identical to SEQ ID NO: 240
  Description of Artificial Sequence: Synthetic polypeptide

SEQ ID NO: 1708 - DNA, 6 bp, Artificial Sequence
  Description of Artificial Sequence: Synthetic oligonucleotide
gtcgag

SEQ ID NO: 1709 - protein, 2 aa, Artificial Sequence
  Description of Artificial Sequence: Synthetic peptide
VE

SEQ ID NO: 1710 - DNA, 186 bp, Artificial Sequence; identical to SEQ ID NO: 255
  Description of Artificial Sequence: Synthetic polynucleotide

SEQ ID NO: 1711 - protein, 62 aa, Artificial Sequence; identical to SEQ ID NO: 216
  Description of Artificial Sequence: Synthetic polypeptide

SEQ ID NO: 1712 - DNA, 6 bp, Artificial Sequence
  Description of Artificial Sequence: Synthetic oligonucleotide
gtcgag

SEQ ID NO: 1713 - protein, 2 aa, Artificial Sequence
  Description of Artificial Sequence: Synthetic peptide
VE

SEQ ID NO: 1714 - DNA, 321 bp, Artificial Sequence; identical to SEQ ID NO: 757
  Description of Artificial Sequence: Synthetic polynucleotide

SEQ ID NO: 1715 - protein, 107 aa, Artificial Sequence; identical to SEQ ID NO: 3
  Description of Artificial Sequence: Synthetic polypeptide

SEQ ID NO: 1716 - DNA, 6 bp, Artificial Sequence
  Description of Artificial Sequence: Synthetic oligonucleotide
gtcgag

SEQ ID NO: 1717 - protein, 2 aa, Artificial Sequence
  Description of Artificial Sequence: Synthetic peptide
VE

SEQ ID NO: 1718 - DNA, 321 bp, Artificial Sequence; identical to SEQ ID NO: 761
  Description of Artificial Sequence: Synthetic polynucleotide

SEQ ID NO: 1719 - protein, 107 aa, Artificial Sequence; identical to SEQ ID NO: 3
  Description of Artificial Sequence: Synthetic polypeptide

SEQ ID NO: 1720 - DNA, 6 bp, Artificial Sequence
  Description of Artificial Sequence: Synthetic oligonucleotide
ccgcgg

SEQ ID NO: 1721 - protein, 2 aa, Artificial Sequence
  Description of Artificial Sequence: Synthetic peptide
PR

SEQ ID NO: 1722 - DNA, 54 bp, Artificial Sequence; identical to SEQ ID NO: 1679
  Description of Artificial Sequence: Synthetic oligonucleotide

SEQ ID NO: 1723 - protein, 18 aa, Artificial Sequence
  Description of Artificial Sequence: Synthetic peptide
EGRGSLLTCGDVEENPGP

SEQ ID NO: 1724 - DNA, 6 bp, Artificial Sequence
  Description of Artificial Sequence: Synthetic oligonucleotide
ccttgg

SEQ ID NO: 1725 - protein, 2 aa, Artificial Sequence
  Description of Artificial Sequence: Synthetic peptide
PW

SEQ ID NO: 1726 - DNA, 63 bp, Artificial Sequence; identical to SEQ ID NO: 1683
  Description of Artificial Sequence: Synthetic oligonucleotide

SEQ ID NO: 1727 - protein, 21 aa, Artificial Sequence
  Description of Artificial Sequence: Synthetic peptide
MEFGLSWLFLVAILKGVQCSR

SEQ ID NO: 1728 - DNA, 348 bp, Artificial Sequence
  Description of Artificial Sequence: Synthetic polynucleotide
cagatccaactggtgcagtcaggcccggaactgaagaagccaggggagacagtcaaaataagttgtaaagccagcggctacatatttactaattacgggatgaattgggtgaagcaagcgccgggcaaatcctttaaatggatggggtggataaacacatacacaggagagtcaacgtacagcgcggacttcaaaggtcgattcgcgttcagtctcgagaccagcgcgagtacagcttacctccacatcaacgatcttaaaaacgaagacacggcaacctatttttgcgcccggtcaggcggttacgaccctatggactattggggccaagggacctccgttacggta

SEQ ID NO: 1729 - protein, 116 aa, Artificial Sequence
  Description of Artificial Sequence: Synthetic polypeptide
QIQLVQSGPELKKPGETVKISCKASGYIFTNYGMNWVKQAPGKSFKWMGWINTYTGESTYSADFKGRFAFSLETSASTAYLHINDLKNEDTATYFCARSGGYDPMDYWGQGTSVTV

SEQ ID NO: 1730 - DNA, 51 bp, Artificial Sequence
  Description of Artificial Sequence: Synthetic oligonucleotide
tcttcaggcggtggcgggagtggtggaggaggctcaggcggcgggggatca

SEQ ID NO: 1731 - protein, 17 aa, Artificial Sequence
  Description of Artificial Sequence: Synthetic peptide
SSGGGGSGGGGSGGGGS

SEQ ID NO: 1732 - DNA, 360 bp, Artificial Sequence
  Description of Artificial Sequence: Synthetic polynucleotide
gacatcgtactgacccaatctcccgctagccttgcagtatccttgggtcaacgcgctacaataagttgccgggctagtgagtccgtagacaactatggcaacaccttcatgcattggtaccaacaaaaaccaggtcagccacccaaacttctcatttacagagcgtctaatctcgaaagcggcatccctgctcgattctctggaagcggaagtagaaccgactttacactgactataaaccccgtcgaagccgatgatgttgccacttattactgtcaacagagcaatgaggacccaccgacattcggtgctggtaccaagctggagttgaaggagtcaaaatacgggcctccctgtccc

SEQ ID NO: 1733 - protein, 120 aa, Artificial Sequence
  Description of Artificial Sequence: Synthetic polypeptide
DIVLTQSPASLAVSLGQRATISCRASESVDNYGNTFMHWYQQKPGQPPKLLIYRASNLESGIPARFSGSGSRTDFTLTINPVEADDVATYYCQQSNEDPPTFGAGTKLELKESKYGPPCP

SEQ ID NO: 1734 - DNA, 6 bp, Artificial Sequence
  Description of Artificial Sequence: Synthetic oligonucleotide
ggctcc

SEQ ID NO: 1735 - protein, 2 aa, Artificial Sequence
  Description of Artificial Sequence: Synthetic peptide
GS

SEQ ID NO: 1736 - DNA, 48 bp, Artificial Sequence; identical to SEQ ID NO: 1695
  Description of Artificial Sequence: Synthetic oligonucleotide

SEQ ID NO: 1737 - protein, 16 aa, Artificial Sequence
  Description of Artificial Sequence: Synthetic peptide
ELPTQGTFSNVSTNVS

SEQ ID NO: 1738 - DNA, 126 bp, Artificial Sequence; identical to SEQ ID NO: 1697
  Description of Artificial Sequence: Synthetic polynucleotide

SEQ ID NO: 1739 - protein, 42 aa, Artificial Sequence; identical to SEQ ID NO: 155
  Description of Artificial Sequence: Synthetic polypeptide

SEQ ID NO: 1740 - DNA, 111 bp, Artificial Sequence; identical to SEQ ID NO: 1699
  Description of Artificial Sequence: Synthetic polynucleotide

SEQ ID NO: 1741 - protein, 37 aa, Artificial Sequence; identical to SEQ ID NO: 157
  Description of Artificial Sequence: Synthetic polypeptide

SEQ ID NO: 1742 - DNA, 6 bp, Artificial Sequence
  Description of Artificial Sequence: Synthetic oligonucleotide
gtcgac

SEQ ID NO: 1743 - protein, 2 aa, Artificial Sequence
  Description of Artificial Sequence: Synthetic peptide
VD

SEQ ID NO: 1744 - DNA, 336 bp, Artificial Sequence; identical to SEQ ID NO: 426
  Description of Artificial Sequence: Synthetic polynucleotide

SEQ ID NO: 1745 - protein, 112 aa, Artificial Sequence; identical to SEQ ID NO: 161
  Description of Artificial Sequence: Synthetic polypeptide

SEQ ID NO: 1746 - DNA, 3 bp, Artificial Sequence
  Description of Artificial Sequence: Synthetic oligonucleotide
tga

SEQ ID NO: 1747 - DNA, 267 bp, Artificial Sequence; identical to SEQ ID NO: 932
  Description of Artificial Sequence: Synthetic polynucleotide

SEQ ID NO: 1748 - protein, 89 aa, Artificial Sequence; identical to SEQ ID NO: 933
  Description of Artificial Sequence: Synthetic polypeptide

SEQ ID NO: 1749 - DNA, 18 bp, Artificial Sequence
  Description of Artificial Sequence: Synthetic oligonucleotide
tcaggcggtggctcaggt

SEQ ID NO: 1750 - protein, 6 aa, Artificial Sequence
  Description of Artificial Sequence: Synthetic peptide
SGGGSG

SEQ ID NO: 1751 - DNA, 318 bp, Artificial Sequence
  Description of Artificial Sequence: Synthetic polynucleotide
ggcgtccaagtcgaaaccattagtcccggcgatggcagaacatttcctaaaaggggacaaacatgtgtcgtccattatacaggcatgttggaggacggcaaaaaggtcgacagtagtagagatcgcaataaacctttcaaattcatgttgggaaaacaagaagtcattaggggatgggaggagggcgtggctcaaatgtccgtcggccaacgcgctaagctcaccatcagccccgactacgcatacggcgctaccggacatcccggaattattccccctcacgctaccttggtgtttgacgtcgaactgttgaagctc

SEQ ID NO: 1752 - protein, 106 aa, Artificial Sequence; identical to SEQ ID NO: 520
  Description of Artificial Sequence: Synthetic polypeptide

SEQ ID NO: 1753 - DNA, 17 bp, Artificial Sequence
  Description of Artificial Sequence: Synthetic oligonucleotide
tcggggggcggatcagg

SEQ ID NO: 1754 - protein, 5 aa, Artificial Sequence
  Description of Artificial Sequence: Synthetic peptide
SGGGS

SEQ ID NO: 1755 - DNA, 864 bp, Artificial Sequence; identical to SEQ ID NO: 44
  Description of Artificial Sequence: Synthetic polynucleotide

SEQ ID NO: 1756 - protein, 288 aa, Artificial Sequence; identical to SEQ ID NO: 45
  Description of Artificial Sequence: Synthetic polypeptide

SEQ ID NO: 1757 - DNA, 6 bp, Artificial Sequence
  Description of Artificial Sequence: Synthetic oligonucleotide
ccgcgg

SEQ ID NO: 1758 - protein, 2 aa, Artificial Sequence
  Description of Artificial Sequence: Synthetic peptide
PR

SEQ ID NO: 1759 - DNA, 54 bp, Artificial Sequence; identical to SEQ ID NO: 138
  Description of Artificial Sequence: Synthetic oligonucleotide

SEQ ID NO: 1760 - protein, 18 aa, Artificial Sequence
  Description of Artificial Sequence: Synthetic peptide
EGRGSLLTCGDVEENPGP

SEQ ID NO: 1761 - DNA, 999 bp, Artificial Sequence; identical to SEQ ID NO: 1056
  Description of Artificial Sequence: Synthetic polynucleotide

SEQ ID NO: 1762 - protein, 333 aa, Artificial Sequence; identical to SEQ ID NO: 15
  Description of Artificial Sequence: Synthetic polypeptide

SEQ ID NO: 1763 - DNA, 3 bp, Artificial Sequence
  Description of Artificial Sequence: Synthetic oligonucleotide
tga

SEQ ID NO: 1764 - DNA, 318 bp, Artificial Sequence; identical to SEQ ID NO: 1751
  Description of Artificial Sequence: Synthetic polynucleotide

SEQ ID NO: 1765 - protein, 106 aa, Artificial Sequence; identical to SEQ ID NO: 520
  Description of Artificial Sequence: Synthetic polypeptide

SEQ ID NO: 1766 - DNA, 17 bp, Artificial Sequence
  Description of Artificial Sequence: Synthetic oligonucleotide
tcggggggcggatcagg

SEQ ID NO: 1767 - protein, 5 aa, Artificial Sequence
  Description of Artificial Sequence: Synthetic peptide
SGGGS

SEQ ID NO: 1768 - DNA, 267 bp, Artificial Sequence; identical to SEQ ID NO: 932
  Description of Artificial Sequence: Synthetic polynucleotide

SEQ ID NO: 1769 - protein, 89 aa, Artificial Sequence; identical to SEQ ID NO: 933
  Description of Artificial Sequence: Synthetic polypeptide

SEQ ID NO: 1770 - DNA, 18 bp, Artificial Sequence
  Description of Artificial Sequence: Synthetic oligonucleotide
tcaggcggtggctcaggt

SEQ ID NO: 1771 - protein, 6 aa, Artificial Sequence
  Description of Artificial Sequence: Synthetic peptide
SGGGSG

SEQ ID NO: 1772 - DNA, 864 bp, Artificial Sequence; identical to SEQ ID NO: 44
  Description of Artificial Sequence: Synthetic polynucleotide

SEQ ID NO: 1773 - protein, 288 aa, Artificial Sequence; identical to SEQ ID NO: 45
  Description of Artificial Sequence: Synthetic polypeptide

SEQ ID NO: 1774 - DNA, 6 bp, Artificial Sequence
  Description of Artificial Sequence: Synthetic oligonucleotide
ccgcgg

SEQ ID NO: 1775 - protein, 2 aa, Artificial Sequence
  Description of Artificial Sequence: Synthetic peptide
PR

SEQ ID NO: 1776 - DNA, 54 bp, Artificial Sequence; identical to SEQ ID NO: 138
  Description of Artificial Sequence: Synthetic oligonucleotide

SEQ ID NO: 1777 - protein, 18 aa, Artificial Sequence
  Description of Artificial Sequence: Synthetic peptide
EGRGSLLTCGDVEENPGP

SEQ ID NO: 1778 - DNA, 999 bp, Artificial Sequence; identical to SEQ ID NO: 1056
  Description of Artificial Sequence: Synthetic polynucleotide

SEQ ID NO: 1779 - protein, 333 aa, Artificial Sequence; identical to SEQ ID NO: 15
  Description of Artificial Sequence: Synthetic polypeptide

SEQ ID NO: 1780 - DNA, 3 bp, Artificial Sequence
  Description of Artificial Sequence: Synthetic oligonucleotide
tga

SEQ ID NO: 1781 - DNA, 163 bp, Artificial Sequence
  Description of Artificial Sequence: Synthetic polynucleotide
agcgcagaggcttggggcagccgagcggcagccaggccccggcccgggcctcggttccagaagggagaggagcccgccaaggcgcgcaagagagcgggctgcctcgcagtccgagccggagagggagcgcgagccgcgccggccccggacggcctccgaaacc

SEQ ID NO: 1782 - protein, 54 aa, Artificial Sequence
  Description of Artificial Sequence: Synthetic polypeptide
AQRLGAAERQPGPGPGLGSRRERSPPRRARERAASQSEPEREREPRRPRTASET

SEQ ID NO: 1783 - DNA, 321 bp, Artificial Sequence; identical to SEQ ID NO: 928
  Description of Artificial Sequence: Synthetic polynucleotide

SEQ ID NO: 1784 - protein, 107 aa, Artificial Sequence; identical to SEQ ID NO: 929
  Description of Artificial Sequence: Synthetic polypeptide

SEQ ID NO: 1785 - DNA, 12 bp, Artificial Sequence
  Description of Artificial Sequence: Synthetic oligonucleotide
ggcgggcaattg

SEQ ID NO: 1786 - protein, 4 aa, Artificial Sequence
  Description of Artificial Sequence: Synthetic peptide
GGQL

SEQ ID NO: 1787 - DNA, 267 bp, Artificial Sequence; identical to SEQ ID NO: 932
  Description of Artificial Sequence: Synthetic polynucleotide

SEQ ID NO: 1788 - protein, 89 aa, Artificial Sequence; identical to SEQ ID NO: 933
  Description of Artificial Sequence: Synthetic polypeptide

SEQ ID NO: 1789 - DNA, 24 bp, Artificial Sequence
  Description of Artificial Sequence: Synthetic oligonucleotide
tcaggcggtggctcaggtccatgg

SEQ ID NO: 1790 - protein, 8 aa, Artificial Sequence
  Description of Artificial Sequence: Synthetic peptide
SGGGSGPW

SEQ ID NO: 1791 - DNA, 858 bp, Artificial Sequence; identical to SEQ ID NO: 936
  Description of Artificial Sequence: Synthetic polynucleotide

SEQ ID NO: 1792 - protein, 286 aa, Artificial Sequence; identical to SEQ ID NO: 937
  Description of Artificial Sequence: Synthetic polypeptide

SEQ ID NO: 1793 - DNA, 15 bp, Artificial Sequence
  Description of Artificial Sequence: Synthetic oligonucleotide
ggatctggaccgcgg

SEQ ID NO: 1794 - protein, 5 aa, Artificial Sequence
  Description of Artificial Sequence: Synthetic peptide
GSGPR

SEQ ID NO: 1795 - DNA, 54 bp, Artificial Sequence; identical to SEQ ID NO: 138
  Description of Artificial Sequence: Synthetic oligonucleotide

SEQ ID NO: 1796 - protein, 18 aa, Artificial Sequence
  Description of Artificial Sequence: Synthetic peptide
EGRGSLLTCGDVEENPGP

SEQ ID NO: 1797 - DNA, 6 bp, Artificial Sequence
  Description of Artificial Sequence: Synthetic oligonucleotide
ccatgg

SEQ ID NO: 1798 - protein, 2 aa, Artificial Sequence
  Description of Artificial Sequence: Synthetic peptide
PW

SEQ ID NO: 1799 - DNA, 63 bp, Artificial Sequence; identical to SEQ ID NO: 142
  Description of Artificial Sequence: Synthetic oligonucleotide

SEQ ID NO: 1800 - protein, 21 aa, Artificial Sequence
  Description of Artificial Sequence: Synthetic peptide
MEFGLSWLFLVAILKGVQCSR

SEQ ID NO: 1801 - DNA, 318 bp, Artificial Sequence; identical to SEQ ID NO: 1003
  Description of Artificial Sequence: Synthetic polynucleotide

SEQ ID NO: 1802 - protein, 106 aa, Artificial Sequence; identical to SEQ ID NO: 1004
  Description of Artificial Sequence: Synthetic polypeptide

SEQ ID NO: 1803 - DNA, 24 bp, Artificial Sequence
  Description of Artificial Sequence: Synthetic oligonucleotide
ggcggaggaagcggaggtgggggc

SEQ ID NO: 1804 - protein, 8 aa, Artificial Sequence
  Description of Artificial Sequence: Synthetic peptide
GGGSGGGG

SEQ ID NO: 1805 - DNA, 336 bp, Artificial Sequence; identical to SEQ ID NO: 1007
  Description of Artificial Sequence: Synthetic polynucleotide

SEQ ID NO: 1806 - protein, 112 aa, Artificial Sequence; identical to SEQ ID NO: 1008
  Description of Artificial Sequence: Synthetic polypeptide

SEQ ID NO: 1807 - DNA, 6 bp, Artificial Sequence
  Description of Artificial Sequence: Synthetic oligonucleotide
ggatcc

SEQ ID NO: 1808 - protein, 2 aa, Artificial Sequence
  Description of Artificial Sequence: Synthetic peptide
GS

SEQ ID NO: 1809 - DNA, 48 bp, Artificial Sequence; identical to SEQ ID NO: 152
  Description of Artificial Sequence: Synthetic oligonucleotide

SEQ ID NO: 1810 - protein, 16 aa, Artificial Sequence
  Description of Artificial Sequence: Synthetic peptide
ELPTQGTFSNVSTNVS

SEQ ID NO: 1811 - DNA, 126 bp, Artificial Sequence; identical to SEQ ID NO: 154
  Description of Artificial Sequence: Synthetic polynucleotide

SEQ ID NO: 1812 - protein, 42 aa, Artificial Sequence; identical to SEQ ID NO: 155
  Description of Artificial Sequence: Synthetic polypeptide

SEQ ID NO: 1813 - DNA, 111 bp, Artificial Sequence; identical to SEQ ID NO: 156
  Description of Artificial Sequence: Synthetic polynucleotide

SEQ ID NO: 1814 - protein, 37 aa, Artificial Sequence; identical to SEQ ID NO: 157
  Description of Artificial Sequence: Synthetic polypeptide

SEQ ID NO: 1815 - DNA, 6 bp, Artificial Sequence
  Description of Artificial Sequence: Synthetic oligonucleotide
gtcgac

SEQ ID NO: 1816 - protein, 2 aa, Artificial Sequence
  Description of Artificial Sequence: Synthetic peptide
VD

SEQ ID NO: 1817 - DNA, 336 bp, Artificial Sequence; identical to SEQ ID NO: 426
  Description of Artificial Sequence: Synthetic polynucleotide

SEQ ID NO: 1818 - protein, 112 aa, Artificial Sequence; identical to SEQ ID NO: 161
  Description of Artificial Sequence: Synthetic polypeptide

SEQ ID NO: 1819 - DNA, 18 bp, Artificial Sequence
  Description of Artificial Sequence: Synthetic oligonucleotide
ggaacgcgtggatcggga

SEQ ID NO: 1820 - protein, 6 aa, Artificial Sequence
  Description of Artificial Sequence: Synthetic peptide
GTRGSG

SEQ ID NO: 1821 - DNA, 57 bp, Artificial Sequence; identical to SEQ ID NO: 737
  Description of Artificial Sequence: Synthetic oligonucleotide

SEQ ID NO: 1822 - protein, 19 aa, Artificial Sequence
  Description of Artificial Sequence: Synthetic peptide
ATNFSLLKQAGDVEENPGP

SEQ ID NO: 1823 - DNA, 516 bp, Artificial Sequence; identical to SEQ ID NO: 251
  Description of Artificial Sequence: Synthetic polynucleotide

SEQ ID NO: 1824 - protein, 172 aa, Artificial Sequence; identical to SEQ ID NO: 240
  Description of Artificial Sequence: Synthetic polypeptide

SEQ ID NO: 1825 - DNA, 6 bp, Artificial Sequence
  Description of Artificial Sequence: Synthetic oligonucleotide
gtcgag

SEQ ID NO: 1826 - protein, 2 aa, Artificial Sequence
  Description of Artificial Sequence: Synthetic peptide
VE

SEQ ID NO: 1827 - DNA, 186 bp, Artificial Sequence; identical to SEQ ID NO: 255
  Description of Artificial Sequence: Synthetic polynucleotide

SEQ ID NO: 1828 - protein, 62 aa, Artificial Sequence; identical to SEQ ID NO: 216
  Description of Artificial Sequence: Synthetic polypeptide

SEQ ID NO: 1829 - DNA, 6 bp, Artificial Sequence
  Description of Artificial Sequence: Synthetic oligonucleotide
gtcgag

SEQ ID NO: 1830 - protein, 2 aa, Artificial Sequence
  Description of Artificial Sequence: Synthetic peptide
VE

SEQ ID NO: 1831 - DNA, 321 bp, Artificial Sequence; identical to SEQ ID NO: 757
  Description of Artificial Sequence: Synthetic polynucleotide

SEQ ID NO: 1832 - protein, 107 aa, Artificial Sequence; identical to SEQ ID NO: 3
  Description of Artificial Sequence: Synthetic polypeptide

SEQ ID NO: 1833 - DNA, 6 bp, Artificial Sequence
  Description of Artificial Sequence: Synthetic oligonucleotide
gtcgag

SEQ ID NO: 1834 - protein, 2 aa, Artificial Sequence
  Description of Artificial Sequence: Synthetic peptide
VE

SEQ ID NO: 1835 - DNA, 321 bp, Artificial Sequence; identical to SEQ ID NO: 761
  Description of Artificial Sequence: Synthetic polynucleotide

SEQ ID NO: 1836 - protein, 107 aa, Artificial Sequence; identical to SEQ ID NO: 3
  Description of Artificial Sequence: Synthetic polypeptide

SEQ ID NO: 1837 - DNA, 3 bp, Artificial Sequence
  Description of Artificial Sequence: Synthetic oligonucleotide
tga

SEQ ID NO: 1838 - DNA, 163 bp, Artificial Sequence; identical to SEQ ID NO: 1781
  Description of Artificial Sequence: Synthetic polynucleotide

SEQ ID NO: 1839 - protein, 54 aa, Artificial Sequence; identical to SEQ ID NO: 1782
  Description of Artificial Sequence: Synthetic polypeptide

SEQ ID NO: 1840 - DNA, 321 bp, Artificial Sequence; identical to SEQ ID NO: 928
  Description of Artificial Sequence: Synthetic polynucleotide

SEQ ID NO: 1841 - protein, 107 aa, Artificial Sequence; identical to SEQ ID NO: 929
  Description of Artificial Sequence: Synthetic polypeptide

SEQ ID NO: 1842 - DNA, 12 bp, Artificial Sequence
  Description of Artificial Sequence: Synthetic oligonucleotide
ggcgggcaattg

SEQ ID NO: 1843 - protein, 4 aa, Artificial Sequence
  Description of Artificial Sequence: Synthetic peptide
GGQL

SEQ ID NO: 1844 - DNA, 267 bp, Artificial Sequence; identical to SEQ ID NO: 932
  Description of Artificial Sequence: Synthetic polynucleotide

SEQ ID NO: 1845 - protein, 89 aa, Artificial Sequence; identical to SEQ ID NO: 933
  Description of Artificial Sequence: Synthetic polypeptide

SEQ ID NO: 1846 - DNA, 24 bp, Artificial Sequence
  Description of Artificial Sequence: Synthetic oligonucleotide
tcaggcggtggctcaggtccatgg

SEQ ID NO: 1847 - protein, 8 aa, Artificial Sequence
  Description of Artificial Sequence: Synthetic peptide
SGGGSGPW

SEQ ID NO: 1848 - DNA, 858 bp, Artificial Sequence; identical to SEQ ID NO: 936
  Description of Artificial Sequence: Synthetic polynucleotide

SEQ ID NO: 1849 - protein, 286 aa, Artificial Sequence; identical to SEQ ID NO: 937
  Description of Artificial Sequence: Synthetic polypeptide

SEQ ID NO: 1850 - DNA, 15 bp, Artificial Sequence
  Description of Artificial Sequence: Synthetic oligonucleotide
ggatctggaccgcgg

SEQ ID NO: 1851 - protein, 5 aa, Artificial Sequence
  Description of Artificial Sequence: Synthetic peptide
GSGPR

SEQ ID NO: 1852 - DNA, 54 bp, Artificial Sequence; identical to SEQ ID NO: 138
  Description of Artificial Sequence: Synthetic oligonucleotide

SEQ ID NO: 1853 - protein, 18 aa, Artificial Sequence
  Description of Artificial Sequence: Synthetic peptide
EGRGSLLTCGDVEENPGP

SEQ ID NO: 1854 - DNA, 6 bp, Artificial Sequence
  Description of Artificial Sequence: Synthetic oligonucleotide
ccatgg

SEQ ID NO: 1855 - protein, 2 aa, Artificial Sequence
  Description of Artificial Sequence: Synthetic peptide
PW

SEQ ID NO: 1856 - DNA, 63 bp, Artificial Sequence; identical to SEQ ID NO: 142
  Description of Artificial Sequence: Synthetic oligonucleotide

SEQ ID NO: 1857 - protein, 21 aa, Artificial Sequence
  Description of Artificial Sequence: Synthetic peptide
MEFGLSWLFLVAILKGVQCSR

SEQ ID NO: 1858 - DNA, 318 bp, Artificial Sequence; identical to SEQ ID NO: 1003
  Description of Artificial Sequence: Synthetic polynucleotide

SEQ ID NO: 1859 - protein, 106 aa, Artificial Sequence; identical to SEQ ID NO: 1004
  Description of Artificial Sequence: Synthetic polypeptide

SEQ ID NO: 1860 - DNA, 24 bp, Artificial Sequence
  Description of Artificial Sequence: Synthetic oligonucleotide
ggcggaggaagcggaggtgggggc

SEQ ID NO: 1861 - protein, 8 aa, Artificial Sequence
  Description of Artificial Sequence: Synthetic peptide
GGGSGGGG

SEQ ID NO: 1862 - DNA, 336 bp, Artificial Sequence; identical to SEQ ID NO: 1007
  Description of Artificial Sequence: Synthetic polynucleotide

SEQ ID NO: 1863 - protein, 112 aa, Artificial Sequence; identical to SEQ ID NO: 1008
  Description of Artificial Sequence: Synthetic polypeptide

SEQ ID NO: 1864 - DNA, 6 bp, Artificial Sequence
  Description of Artificial Sequence: Synthetic oligonucleotide
ggatcc

SEQ ID NO: 1865 - protein, 2 aa, Artificial Sequence
  Description of Artificial Sequence: Synthetic peptide
GS

SEQ ID NO: 1866 - DNA, 48 bp, Artificial Sequence; identical to SEQ ID NO: 152
  Description of Artificial Sequence: Synthetic oligonucleotide

SEQ ID NO: 1867 - protein, 16 aa, Artificial Sequence
  Description of Artificial Sequence: Synthetic peptide
ELPTQGTFSNVSTNVS

SEQ ID NO: 1868 - DNA, 126 bp, Artificial Sequence; identical to SEQ ID NO: 154
  Description of Artificial Sequence: Synthetic polynucleotide

SEQ ID NO: 1869 - protein, 42 aa, Artificial Sequence; identical to SEQ ID NO: 155
  Description of Artificial Sequence: Synthetic polypeptide

SEQ ID NO: 1870 - DNA, 111 bp, Artificial Sequence; identical to SEQ ID NO: 156
  Description of Artificial Sequence: Synthetic polynucleotide

SEQ ID NO: 1871 - protein, 37 aa, Artificial Sequence; identical to SEQ ID NO: 157
  Description of Artificial Sequence: Synthetic polypeptide

SEQ ID NO: 1872 - DNA, 6 bp, Artificial Sequence
  Description of Artificial Sequence: Synthetic oligonucleotide
gtcgac

SEQ ID NO: 1873 - protein, 2 aa, Artificial Sequence
  Description of Artificial Sequence: Synthetic peptide
VD

SEQ ID NO: 1874 - DNA, 335 bp, Artificial Sequence; identical to SEQ ID NO: 725
  Description of Artificial Sequence: Synthetic polynucleotide

SEQ ID NO: 1875 - protein, 112 aa, Artificial Sequence; identical to SEQ ID NO: 161
  Description of Artificial Sequence: Synthetic polypeptide

SEQ ID NO: 1876 - DNA, 3 bp, Artificial Sequence
  Description of Artificial Sequence: Synthetic oligonucleotide
tga

SEQ ID NO: 1877 - DNA, 267 bp, Artificial Sequence; identical to SEQ ID NO: 932
  Description of Artificial Sequence: Synthetic polynucleotide

SEQ ID NO: 1878 - protein, 89 aa, Artificial Sequence; identical to SEQ ID NO: 933
  Description of Artificial Sequence: Synthetic polypeptide

SEQ ID NO: 1879 - DNA, 12 bp, Artificial Sequence
  Description of Artificial Sequence: Synthetic oligonucleotide
ggcgggcaattg

SEQ ID NO: 1880 - protein, 4 aa, Artificial Sequence
  Description of Artificial Sequence: Synthetic peptide
GGQL

SEQ ID NO: 1881 - DNA, 321 bp, Artificial Sequence; identical to SEQ ID NO: 928
  Description of Artificial Sequence: Synthetic polynucleotide

SEQ ID NO: 1882 - protein, 107 aa, Artificial Sequence; identical to SEQ ID NO: 929
  Description of Artificial Sequence: Synthetic polypeptide

SEQ ID NO: 1883 - DNA, 24 bp, Artificial Sequence
  Description of Artificial Sequence: Synthetic oligonucleotide
tcaggcggtggctcaggtccatgg

SEQ ID NO: 1884 - protein, 8 aa, Artificial Sequence
  Description of Artificial Sequence: Synthetic peptide
SGGGSGPW

SEQ ID NO: 1885 - DNA, 858 bp, Artificial Sequence; identical to SEQ ID NO: 936
  Description of Artificial Sequence: Synthetic polynucleotide

SEQ ID NO: 1886 - protein, 286 aa, Artificial Sequence; identical to SEQ ID NO: 937
  Description of Artificial Sequence: Synthetic polypeptide

SEQ ID NO: 1887 - DNA, 15 bp, Artificial Sequence
  Description of Artificial Sequence: Synthetic oligonucleotide
ggatctggaccgcgg

SEQ ID NO: 1888 - protein, 5 aa, Artificial Sequence
  Description of Artificial Sequence: Synthetic peptide
GSGPR

SEQ ID NO: 1889 - DNA, 54 bp, Artificial Sequence; identical to SEQ ID NO: 138
  Description of Artificial Sequence: Synthetic oligonucleotide

SEQ ID NO: 1890 - protein, 18 aa, Artificial Sequence
  Description of Artificial Sequence: Synthetic peptide
EGRGSLLTCGDVEENPGP

SEQ ID NO: 1891 - DNA, 999 bp, Artificial Sequence; identical to SEQ ID NO: 1056
  Description of Artificial Sequence: Synthetic polynucleotide

SEQ ID NO: 1892 - protein, 333 aa, Artificial Sequence; identical to SEQ ID NO: 15
  Description of Artificial Sequence: Synthetic polypeptide

SEQ ID NO: 1893 - DNA, 3 bp, Artificial Sequence
  Description of Artificial Sequence: Synthetic oligonucleotide
tga

SEQ ID NO: 1894 - DNA, 516 bp, Artificial Sequence; identical to SEQ ID NO: 251
  Description of Artificial Sequence: Synthetic polynucleotide

SEQ ID NO: 1895 - protein, 172 aa, Artificial Sequence; identical to SEQ ID NO: 240
  Description of Artificial Sequence: Synthetic polypeptide

SEQ ID NO: 1896 - DNA, 6 bp, Artificial Sequence
  Description of Artificial Sequence: Synthetic oligonucleotide
gtcgag

SEQ ID NO: 1897 - protein, 2 aa, Artificial Sequence
  Description of Artificial Sequence: Synthetic peptide
VE

SEQ ID NO: 1898 - DNA, 186 bp, Artificial Sequence; identical to SEQ ID NO: 255
  Description of Artificial Sequence: Synthetic polynucleotide

SEQ ID NO: 1899 - protein, 62 aa, Artificial Sequence; identical to SEQ ID NO: 216
  Description of Artificial Sequence: Synthetic polypeptide

SEQ ID NO: 1900 - DNA, 6 bp, Artificial Sequence
  Description of Artificial Sequence: Synthetic oligonucleotide
gtcgag

SEQ ID NO: 1901 - protein, 2 aa, Artificial Sequence
  Description of Artificial Sequence: Synthetic peptide
VE

SEQ ID NO: 1902 - DNA, 321 bp, Artificial Sequence; identical to SEQ ID NO: 1553
  Description of Artificial Sequence: Synthetic polynucleotide

SEQ ID NO: 1903 - protein, 107 aa, Artificial Sequence; identical to SEQ ID NO: 929
  Description of Artificial Sequence: Synthetic polypeptide

SEQ ID NO: 1904 - DNA, 6 bp, Artificial Sequence
  Description of Artificial Sequence: Synthetic oligonucleotide
gtcgag

SEQ ID NO: 1905 - protein, 2 aa, Artificial Sequence
  Description of Artificial Sequence: Synthetic peptide
VE

SEQ ID NO: 1906 - DNA, 273 bp, Artificial Sequence; identical to SEQ ID NO: 1557
  Description of Artificial Sequence: Synthetic polynucleotide

SEQ ID NO: 1907 - protein, 91 aa, Artificial Sequence; identical to SEQ ID NO: 1558
  Description of Artificial Sequence: Synthetic polypeptide

SEQ ID NO: 1908 - DNA, 9 bp, Artificial Sequence
  Description of Artificial Sequence: Synthetic oligonucleotide
ggctcaggt

SEQ ID NO: 1909 - protein, 3 aa, Artificial Sequence
  Description of Artificial Sequence: Synthetic peptide
GSG

SEQ ID NO: 1910 - DNA, 54 bp, Artificial Sequence; identical to SEQ ID NO: 138
  Description of Artificial Sequence: Synthetic oligonucleotide

SEQ ID NO: 1911 - protein, 18 aa, Artificial Sequence
  Description of Artificial Sequence: Synthetic peptide
EGRGSLLTCGDVEENPGP

SEQ ID NO: 1912 - DNA, 6 bp, Artificial Sequence
  Description of Artificial Sequence: Synthetic oligonucleotide
ccatgg

SEQ ID NO: 1913 - protein, 2 aa, Artificial Sequence
  Description of Artificial Sequence: Synthetic peptide
PW

SEQ ID NO: 1914 - DNA, 63 bp, Artificial Sequence; identical to SEQ ID NO: 142
  Description of Artificial Sequence: Synthetic oligonucleotide

SEQ ID NO: 1915 - protein, 21 aa, Artificial Sequence
  Description of Artificial Sequence: Synthetic peptide
MEFGLSWLFLVAILKGVQCSR

SEQ ID NO: 1916 - DNA, 318 bp, Artificial Sequence; identical to SEQ ID NO: 1003
  Description of Artificial Sequence: Synthetic polynucleotide

SEQ ID NO: 1917 - protein, 106 aa, Artificial Sequence; identical to SEQ ID NO: 1004
  Description of Artificial Sequence: Synthetic polypeptide

SEQ ID NO: 1918 - DNA, 24 bp, Artificial Sequence
  Description of Artificial Sequence: Synthetic oligonucleotide
ggcggaggaagcggaggtgggggc

SEQ ID NO: 1919 - protein, 8 aa, Artificial Sequence
  Description of Artificial Sequence: Synthetic peptide
GGGSGGGG

SEQ ID NO: 1920 - DNA, 336 bp, Artificial Sequence; identical to SEQ ID NO: 1007
  Description of Artificial Sequence: Synthetic polynucleotide

SEQ ID NO: 1921 - protein, 112 aa, Artificial Sequence; identical to SEQ ID NO: 1008
  Description of Artificial Sequence: Synthetic polypeptide

SEQ ID NO: 1922 - DNA, 6 bp, Artificial Sequence
  Description of Artificial Sequence: Synthetic oligonucleotide
ggatcc

SEQ ID NO: 1923 - protein, 2 aa, Artificial Sequence
  Description of Artificial Sequence: Synthetic peptide
GS

SEQ ID NO: 1924 - DNA, 48 bp, Artificial Sequence; identical to SEQ ID NO: 152
  Description of Artificial Sequence: Synthetic oligonucleotide

SEQ ID NO: 1925 - protein, 16 aa, Artificial Sequence
  Description of Artificial Sequence: Synthetic peptide
ELPTQGTFSNVSTNVS

SEQ ID NO: 1926 - DNA, 126 bp, Artificial Sequence; identical to SEQ ID NO: 154
  Description of Artificial Sequence: Synthetic polynucleotide

SEQ ID NO: 1927 - protein, 42 aa, Artificial Sequence; identical to SEQ ID NO: 155
  Description of Artificial Sequence: Synthetic polypeptide

SEQ ID NO: 1928 - DNA, 111 bp, Artificial Sequence; identical to SEQ ID NO: 156
  Description of Artificial Sequence: Synthetic polynucleotide

SEQ ID NO: 1929 - protein, 37 aa, Artificial Sequence; identical to SEQ ID NO: 157
  Description of Artificial Sequence: Synthetic polypeptide

SEQ ID NO: 1930 - DNA, 6 bp, Artificial Sequence
  Description of Artificial Sequence: Synthetic oligonucleotide
gtcgac

SEQ ID NO: 1931 - protein, 2 aa, Artificial Sequence
  Description of Artificial Sequence: Synthetic peptide
VD

SEQ ID NO: 1932 - DNA, 336 bp, Artificial Sequence; identical to SEQ ID NO: 426
  Description of Artificial Sequence: Synthetic polynucleotide

SEQ ID NO: 1933 - protein, 112 aa, Artificial Sequence; identical to SEQ ID NO: 161
  Description of Artificial Sequence: Synthetic polypeptide

SEQ ID NO: 1934 - DNA, 18 bp, Artificial Sequence
  Description of Artificial Sequence: Synthetic oligonucleotide
atgctcgagcaattggag

SEQ ID NO: 1935 - protein, 6 aa, Artificial Sequence
  Description of Artificial Sequence: Synthetic peptide
MLEQLE

SEQ ID NO: 1936 - DNA, 321 bp, Artificial Sequence; identical to SEQ ID NO: 317
  Description of Artificial Sequence: Synthetic polynucleotide

SEQ ID NO: 1937 - protein, 107 aa, Artificial Sequence; identical to SEQ ID NO: 3
  Description of Artificial Sequence: Synthetic polypeptide

SEQ ID NO: 1938 - DNA, 24 bp, Artificial Sequence
  Description of Artificial Sequence: Synthetic oligonucleotide
tcaggcggtggctcaggtgtggac

SEQ ID NO: 1939 - protein, 8 aa, Artificial Sequence
  Description of Artificial Sequence: Synthetic peptide
SGGGSGVD

SEQ ID NO: 1940 - DNA, 858 bp, Artificial Sequence; identical to SEQ ID NO: 936
  Description of Artificial Sequence: Synthetic polynucleotide

SEQ ID NO: 1941 - protein, 286 aa, Artificial Sequence; identical to SEQ ID NO: 937
  Description of Artificial Sequence: Synthetic polypeptide

SEQ ID NO: 1942 - DNA, 15 bp, Artificial Sequence
  Description of Artificial Sequence: Synthetic oligonucleotide
ggatctggaccgcgg

SEQ ID NO: 1943 - protein, 5 aa, Artificial Sequence
  Description of Artificial Sequence: Synthetic peptide
GSGPR

SEQ ID NO: 1944 - DNA, 54 bp, Artificial Sequence; identical to SEQ ID NO: 138
  Description of Artificial Sequence: Synthetic oligonucleotide

SEQ ID NO: 1945 - protein, 18 aa, Artificial Sequence
  Description of Artificial Sequence: Synthetic peptide
EGRGSLLTCGDVEENPGP

SEQ ID NO: 1946 - DNA, 6 bp, Artificial Sequence
  Description of Artificial Sequence: Synthetic oligonucleotide
ccacgg

SEQ ID NO: 1947 - protein, 2 aa, Artificial Sequence
  Description of Artificial Sequence: Synthetic peptide
PR

SEQ ID NO: 1948 - DNA, 63 bp, Artificial Sequence; identical to SEQ ID NO: 142
  Description of Artificial Sequence: Synthetic oligonucleotide

SEQ ID NO: 1949 - protein, 21 aa, Artificial Sequence
  Description of Artificial Sequence: Synthetic peptide
MEFGLSWLFLVAILKGVQCSR

SEQ ID NO: 1950 - DNA, 318 bp, Artificial Sequence; identical to SEQ ID NO: 1003
  Description of Artificial Sequence: Synthetic polynucleotide

SEQ ID NO: 1951 - protein, 106 aa, Artificial Sequence; identical to SEQ ID NO: 1004
  Description of Artificial Sequence: Synthetic polypeptide

SEQ ID NO: 1952 - DNA, 24 bp, Artificial Sequence
  Description of Artificial Sequence: Synthetic oligonucleotide
ggcggaggaagcggaggtgggggc

SEQ ID NO: 1953 - protein, 8 aa, Artificial Sequence
  Description of Artificial Sequence: Synthetic peptide
GGGSGGGG

SEQ ID NO: 1954 - DNA, 336 bp, Artificial Sequence; identical to SEQ ID NO: 1007
  Description of Artificial Sequence: Synthetic polynucleotide

SEQ ID NO: 1955 - protein, 112 aa, Artificial Sequence; identical to SEQ ID NO: 1008
  Description of Artificial Sequence: Synthetic polypeptide

SEQ ID NO: 1956 - DNA, 6 bp, Artificial Sequence
  Description of Artificial Sequence: Synthetic oligonucleotide
ggatcc

SEQ ID NO: 1957 - protein, 2 aa, Artificial Sequence
  Description of Artificial Sequence: Synthetic peptide
GS

SEQ ID NO: 1958 - DNA, 48 bp, Artificial Sequence; identical to SEQ ID NO: 152
  Description of Artificial Sequence: Synthetic oligonucleotide

SEQ ID NO: 1959 - protein, 16 aa, Artificial Sequence
  Description of Artificial Sequence: Synthetic peptide
ELPTQGTFSNVSTNVS

SEQ ID NO: 1960 - DNA, 336 bp, Artificial Sequence; identical to SEQ ID NO: 426
  Description of Artificial Sequence: Synthetic polynucleotide

SEQ ID NO: 1961 - protein, 112 aa, Artificial Sequence; identical to SEQ ID NO: 161
  Description of Artificial Sequence: Synthetic polypeptide

SEQ ID NO: 1962 - DNA, 9 bp, Artificial Sequence
  Description of Artificial Sequence: Synthetic oligonucleotide
ggttccgga

SEQ ID NO: 1963 - protein, 3 aa, Artificial Sequence
  Description of Artificial Sequence: Synthetic peptide
GSG

SEQ ID NO: 1964 - DNA, 54 bp, Artificial Sequence; identical to SEQ ID NO: 138
  Description of Artificial Sequence: Synthetic oligonucleotide

SEQ ID NO: 1965 - protein, 18 aa, Artificial Sequence
  Description of Artificial Sequence: Synthetic peptide
EGRGSLLTCGDVEENPGP

SEQ ID NO: 1966 - DNA, 9 bp, Artificial Sequence
  Description of Artificial Sequence: Synthetic oligonucleotide
ggatctgga

SEQ ID NO: 1967 - protein, 3 aa, Artificial Sequence
  Description of Artificial Sequence: Synthetic peptide
GSG

SEQ ID NO: 1968 - DNA, 57 bp, Artificial Sequence; identical to SEQ ID NO: 1283
  Description of Artificial Sequence: Synthetic oligonucleotide

SEQ ID NO: 1969 - protein, 19 aa, Artificial Sequence
  Description of Artificial Sequence: Synthetic peptide
ATNFSLLKQAGDVEENPGP

SEQ ID NO: 1970 - DNA, 516 bp, Artificial Sequence; identical to SEQ ID NO: 251
  Description of Artificial Sequence: Synthetic polynucleotide

SEQ ID NO: 1971 - protein, 172 aa, Artificial Sequence; identical to SEQ ID NO: 240
  Description of Artificial Sequence: Synthetic polypeptide

SEQ ID NO: 1972 - DNA, 6 bp, Artificial Sequence
  Description of Artificial Sequence: Synthetic oligonucleotide
gtcgag

SEQ ID NO: 1973 - protein, 2 aa, Artificial Sequence
  Description of Artificial Sequence: Synthetic peptide
VE

SEQ ID NO: 1974 - DNA, 186 bp, Artificial Sequence; identical to SEQ ID NO: 255
  Description of Artificial Sequence: Synthetic polynucleotide

SEQ ID NO: 1975 - protein, 62 aa, Artificial Sequence; identical to SEQ ID NO: 216
  Description of Artificial Sequence: Synthetic polypeptide

SEQ ID NO: 1976 - DNA, 6 bp, Artificial Sequence
  Description of Artificial Sequence: Synthetic oligonucleotide
gtcgag

SEQ ID NO: 1977 - protein, 2 aa, Artificial Sequence
  Description of Artificial Sequence: Synthetic peptide
VE

SEQ ID NO: 1978 - DNA, 321 bp, Artificial Sequence; identical to SEQ ID NO: 1553
  Description of Artificial Sequence: Synthetic polynucleotide

SEQ ID NO: 1979 - protein, 107 aa, Artificial Sequence; identical to SEQ ID NO: 929
  Description of Artificial Sequence: Synthetic polypeptide

SEQ ID NO: 1980 - DNA, 6 bp, Artificial Sequence
  Description of Artificial Sequence: Synthetic oligonucleotide
gtcgag

SEQ ID NO: 1981 - protein, 2 aa, Artificial Sequence
  Description of Artificial Sequence: Synthetic peptide
VE

SEQ ID NO: 1982 - DNA, 273 bp, Artificial Sequence; identical to SEQ ID NO: 1557
  Description of Artificial Sequence: Synthetic polynucleotide

SEQ ID NO: 1983 - protein, 91 aa, Artificial Sequence; identical to SEQ ID NO: 1558
  Description of Artificial Sequence: Synthetic polypeptide

SEQ ID NO: 1984 - DNA, 27 bp, Artificial Sequence
  Description of Artificial Sequence: Synthetic oligonucleotide
tcaggcggtggctcaggtccgcggtga

SEQ ID NO: 1985 - protein, 8 aa, Artificial Sequence
  Description of Artificial Sequence: Synthetic peptide
SGGGSGPR

SEQ ID NO: 1986 - DNA, 18 bp, Artificial Sequence
  Description of Artificial Sequence: Synthetic oligonucleotide
atgctcgagcaattggag

SEQ ID NO: 1987 - protein, 6 aa, Artificial Sequence
  Description of Artificial Sequence: Synthetic peptide
MLEQLE

SEQ ID NO: 1988 - DNA, 321 bp, Artificial Sequence; identical to SEQ ID NO: 317
  Description of Artificial Sequence: Synthetic polynucleotide

SEQ ID NO: 1989 - protein, 107 aa, Artificial Sequence; identical to SEQ ID NO: 3
  Description of Artificial Sequence: Synthetic polypeptide

SEQ ID NO: 1990 - DNA, 24 bp, Artificial Sequence
  Description of Artificial Sequence: Synthetic oligonucleotide
tcaggcggtggctcaggtgtggac

SEQ ID NO: 1991 - protein, 8 aa, Artificial Sequence
  Description of Artificial Sequence: Synthetic peptide
SGGGSGVD

SEQ ID NO: 1992 - DNA, 858 bp, Artificial Sequence; identical to SEQ ID NO: 936
  Description of Artificial Sequence: Synthetic polynucleotide

SEQ ID NO: 1993 - protein, 286 aa, Artificial Sequence; identical to SEQ ID NO: 937
  Description of Artificial Sequence: Synthetic polypeptide

SEQ ID NO: 1994 - DNA, 15 bp, Artificial Sequence
  Description of Artificial Sequence: Synthetic oligonucleotide
ggatctggaccgcgg

SEQ ID NO: 1995 - protein, 5 aa, Artificial Sequence
  Description of Artificial Sequence: Synthetic peptide
GSGPR

SEQ ID NO: 1996 - DNA, 54 bp, Artificial Sequence; identical to SEQ ID NO: 138
  Description of Artificial Sequence: Synthetic oligonucleotide

SEQ ID NO: 1997 - protein, 18 aa, Artificial Sequence
  Description of Artificial Sequence: Synthetic peptide
EGRGSLLTCGDVEENPGP

SEQ ID NO: 1998 - DNA, 12 bp, Artificial Sequence
  Description of Artificial Sequence: Synthetic oligonucleotide
gcatgcgccacc

SEQ ID NO: 1999 - protein, 4 aa, Artificial Sequence
  Description of Artificial Sequence: Synthetic peptide
ACAT

SEQ ID NO: 2000 - DNA, 63 bp, Artificial Sequence; identical to SEQ ID NO: 448
  Description of Artificial Sequence: Synthetic oligonucleotide

SEQ ID NO: 2001 - protein, 21 aa, Artificial Sequence
  Description of Artificial Sequence: Synthetic peptide
MEFGLSWLFLVAILKGVQCSR

SEQ ID NO: 2002 - DNA, 357 bp, Artificial Sequence; identical to SEQ ID NO: 168
  Description of Artificial Sequence: Synthetic polynucleotide

SEQ ID NO: 2003 - protein, 119 aa, Artificial Sequence; identical to SEQ ID NO: 169
  Description of Artificial Sequence: Synthetic polypeptide

SEQ ID NO: 2004 - DNA, 45 bp, Artificial Sequence; identical to SEQ ID NO: 452
  Description of Artificial Sequence: Synthetic oligonucleotide

SEQ ID NO: 2005 - protein, 15 aa, Artificial Sequence
  Description of Artificial Sequence: Synthetic peptide
GGGGSGGGGSGGGGS

SEQ ID NO: 2006 - DNA, 327 bp, Artificial Sequence; identical to SEQ ID NO: 164
  Description of Artificial Sequence: Synthetic polynucleotide

SEQ ID NO: 2007 - protein, 112 aa, Artificial Sequence; identical to SEQ ID NO: 1008
  Description of Artificial Sequence: Synthetic polypeptide

SEQ ID NO: 2008 - DNA, 6 bp, Artificial Sequence
  Description of Artificial Sequence: Synthetic oligonucleotide
atgcat

SEQ ID NO: 2009 - protein, 2 aa, Artificial Sequence
  Description of Artificial Sequence: Synthetic peptide
MH

SEQ ID NO: 2010 - DNA, 48 bp, Artificial Sequence; identical to SEQ ID NO: 152
  Description of Artificial Sequence: Synthetic oligonucleotide

SEQ ID NO: 2011 - protein, 16 aa, Artificial Sequence
  Description of Artificial Sequence: Synthetic peptide
ELPTQGTFSNVSTNVS

SEQ ID NO: 2012 - DNA, 336 bp, Artificial Sequence; identical to SEQ ID NO: 426
  Description of Artificial Sequence: Synthetic polynucleotide

SEQ ID NO: 2013 - protein, 112 aa, Artificial Sequence; identical to SEQ ID NO: 161
  Description of Artificial Sequence: Synthetic polypeptide

SEQ ID NO: 2014 - DNA, 18 bp, Artificial Sequence
  Description of Artificial Sequence: Synthetic oligonucleotide
atgctcgagcaattggag

SEQ ID NO: 2015 - protein, 6 aa, Artificial Sequence
  Description of Artificial Sequence: Synthetic peptide
MLEQLE

SEQ ID NO: 2016 - DNA, 321 bp, Artificial Sequence; identical to SEQ ID NO: 317
  Description of Artificial Sequence: Synthetic polynucleotide

SEQ ID NO: 2017 - protein, 107 aa, Artificial Sequence; identical to SEQ ID NO: 3
  Description of Artificial Sequence: Synthetic polypeptide

SEQ ID NO: 2018 - DNA, 24 bp, Artificial Sequence
  Description of Artificial Sequence: Synthetic oligonucleotide
tcaggcggtggctcaggtgtggac

SEQ ID NO: 2019 - protein, 8 aa, Artificial Sequence
  Description of Artificial Sequence: Synthetic peptide
SGGGSGVD

SEQ ID NO: 2020 - DNA, 858 bp, Artificial Sequence; identical to SEQ ID NO: 936
  Description of Artificial Sequence: Synthetic polynucleotide

SEQ ID NO: 2021 - protein, 286 aa, Artificial Sequence; identical to SEQ ID NO: 937
  Description of Artificial Sequence: Synthetic polypeptide

SEQ ID NO: 2022 - DNA, 15 bp, Artificial Sequence
  Description of Artificial Sequence: Synthetic oligonucleotide
ggatctggaccgcgg

SEQ ID NO: 2023 - protein, 5 aa, Artificial Sequence
  Description of Artificial Sequence: Synthetic peptide
GSGPR

SEQ ID NO: 2024 - DNA, 54 bp, Artificial Sequence; identical to SEQ ID NO: 138
  Description of Artificial Sequence: Synthetic oligonucleotide

SEQ ID NO: 2025 - protein, 18 aa, Artificial Sequence
  Description of Artificial Sequence: Synthetic peptide
EGRGSLLTCGDVEENPGP

SEQ ID NO: 2026 - DNA, 6 bp, Artificial Sequence
  Description of Artificial Sequence: Synthetic oligonucleotide
ccatgg

SEQ ID NO: 2027 - protein, 2 aa, Artificial Sequence
  Description of Artificial Sequence: Synthetic peptide
PW

SEQ ID NO: 2028 - DNA, 63 bp, Artificial Sequence; identical to SEQ ID NO: 142
  Description of Artificial Sequence: Synthetic oligonucleotide

SEQ ID NO: 2029 - protein, 21 aa, Artificial Sequence
  Description of Artificial Sequence: Synthetic peptide
MEFGLSWLFLVAILKGVQCSR

SEQ ID NO: 2030 - DNA, 318 bp, Artificial Sequence; identical to SEQ ID NO: 1003
  Description of Artificial Sequence: Synthetic polynucleotide

SEQ ID NO: 2031 - protein, 106 aa, Artificial Sequence; identical to SEQ ID NO: 1004
  Description of Artificial Sequence: Synthetic polypeptide

SEQ ID NO: 2032 - DNA, 24 bp, Artificial Sequence
  Description of Artificial Sequence: Synthetic oligonucleotide
ggcggaggaagcggaggtgggggc

SEQ ID NO: 2033 - protein, 8 aa, Artificial Sequence
  Description of Artificial Sequence: Synthetic peptide
GGGSGGGG

SEQ ID NO: 2034 - DNA, 336 bp, Artificial Sequence; identical to SEQ ID NO: 1007
  Description of Artificial Sequence: Synthetic polynucleotide

SEQ ID NO: 2035 - protein, 112 aa, Artificial Sequence; identical to SEQ ID NO: 1008
  Description of Artificial Sequence: Synthetic polypeptide

SEQ ID NO: 2036 - DNA, 6 bp, Artificial Sequence
  Description of Artificial Sequence: Synthetic oligonucleotide
ggatcc

SEQ ID NO: 2037 - protein, 2 aa, Artificial Sequence
  Description of Artificial Sequence: Synthetic peptide
GS

SEQ ID NO: 2038 - DNA, 48 bp, Artificial Sequence; identical to SEQ ID NO: 152
  Description of Artificial Sequence: Synthetic oligonucleotide

SEQ ID NO: 2039 - protein, 16 aa, Artificial Sequence
  Description of Artificial Sequence: Synthetic peptide
ELPTQGTFSNVSTNVS

SEQ ID NO: 2040 - DNA, 126 bp, Artificial Sequence; identical to SEQ ID NO: 154
  Description of Artificial Sequence: Synthetic polynucleotide

SEQ ID NO: 2041 - protein, 42 aa, Artificial Sequence; identical to SEQ ID NO: 155
  Description of Artificial Sequence: Synthetic polypeptide

SEQ ID NO: 2042 - DNA, 111 bp, Artificial Sequence; identical to SEQ ID NO: 156
  Description of Artificial Sequence: Synthetic polynucleotide

SEQ ID NO: 2043 - protein, 37 aa, Artificial Sequence; identical to SEQ ID NO: 157
  Description of Artificial Sequence: Synthetic polypeptide

SEQ ID NO: 2044 - DNA, 6 bp, Artificial Sequence
  Description of Artificial Sequence: Synthetic oligonucleotide
gtcgac

SEQ ID NO: 2045 - protein, 2 aa, Artificial Sequence
  Description of Artificial Sequence: Synthetic peptide
VD

SEQ ID NO: 2046 - DNA, 336 bp, Artificial Sequence; identical to SEQ ID NO: 426
  Description of Artificial Sequence: Synthetic polynucleotide

SEQ ID NO: 2047 - protein, 112 aa, Artificial Sequence; identical to SEQ ID NO: 161
  Description of Artificial Sequence: Synthetic polypeptide

SEQ ID NO: 2048 - DNA, 276 bp, Artificial Sequence
  Description of Artificial Sequence: Synthetic polynucleotide
atgcaattggaaatgtggcatgaagggttggaagaagcttcaaggctgtacttcggagagaggaacgtgaagggcatgtttgaggttcttgaacctctgcacgccatgatggaacggggaccgcagacactgaaagaaacctcttttaatcaggcctacggcagagacctgatggaggcccaagaatggtgtagaaagtatatgaaatccggtaacgtgaaagacctgctccaggcctgggacctttattaccatgtgttcaggcggatcagtaag

SEQ ID NO: 2049 - protein, 92 aa, Artificial Sequence
  Description of Artificial Sequence: Synthetic polypeptide
MQLEMWHEGLEEASRLYFGERNVKGMFEVLEPLHAMMERGPQTLKETSFNQAYGRDLMEAQEWCRKYMKSGNVKDLLQAWDLYYHVFRRISK

SEQ ID NO: 2050 - DNA, 24 bp, Artificial Sequence
  Description of Artificial Sequence: Synthetic oligonucleotide
tcaggcggtggcagcggccaattg

SEQ ID NO: 2051 - protein, 8 aa, Artificial Sequence
  Description of Artificial Sequence: Synthetic peptide
SGGGSGQL

SEQ ID NO: 2052 - DNA, 321 bp, Artificial Sequence
  Description of Artificial Sequence: Synthetic polynucleotide
ggagtccaagtcgaaaccattagtcccggcgatggcagaacatttcctacaaggggacaaacatgtgtcgtccattatacaggcatgttggaggacggcaaaaagttcgacagtagtagagatcgcaataaacctttcaaattcatgttgggaaaacaagaagtcattaggggatgggaggagggcgtggctcaaatgtccgtcggccaacgcgctaagctcaccatcagccccgactacgcatacggcgctaccggacatcccggaattattccccctcacgctaccttggtgtttgacgtcgaactgttgaagctcgaa

SEQ ID NO: 2053 - protein, 107 aa, Artificial Sequence; identical to SEQ ID NO: 929
  Description of Artificial Sequence: Synthetic polypeptide

SEQ ID NO: 2054 - DNA, 18 bp, Artificial Sequence
  Description of Artificial Sequence: Synthetic oligonucleotide
ggaagcatgcggatcgga

SEQ ID NO: 2055 - protein, 6 aa, Artificial Sequence
  Description of Artificial Sequence: Synthetic peptide
GSMRIG

SEQ ID NO: 2056 - DNA, 516 bp, Artificial Sequence; identical to SEQ ID NO: 251
  Description of Artificial Sequence: Synthetic polynucleotide

SEQ ID NO: 2057 - protein, 172 aa, Artificial Sequence; identical to SEQ ID NO: 240
  Description of Artificial Sequence: Synthetic polypeptide

SEQ ID NO: 2058 - DNA, 6 bp, Artificial Sequence
  Description of Artificial Sequence: Synthetic oligonucleotide
gtcgag

SEQ ID NO: 2059 - protein, 2 aa, Artificial Sequence
  Description of Artificial Sequence: Synthetic peptide
VE

SEQ ID NO: 2060 - DNA, 186 bp, Artificial Sequence; identical to SEQ ID NO: 255
  Description of Artificial Sequence: Synthetic polynucleotide

SEQ ID NO: 2061 - protein, 62 aa, Artificial Sequence; identical to SEQ ID NO: 216
  Description of Artificial Sequence: Synthetic polypeptide

SEQ ID NO: 2062 - DNA, 15 bp, Artificial Sequence
  Description of Artificial Sequence: Synthetic oligonucleotide
ggcagtgggccgcgg

SEQ ID NO: 2063 - protein, 5 aa, Artificial Sequence
  Description of Artificial Sequence: Synthetic peptide
GSGPR

SEQ ID NO: 2064 - DNA, 54 bp, Artificial Sequence; identical to SEQ ID NO: 138
  Description of Artificial Sequence: Synthetic oligonucleotide

SEQ ID NO: 2065 - protein, 18 aa, Artificial Sequence
  Description of Artificial Sequence: Synthetic peptide
EGRGSLLTCGDVEENPGP

SEQ ID NO: 2066 - DNA, 6 bp, Artificial Sequence
  Description of Artificial Sequence: Synthetic oligonucleotide
ccatgg

SEQ ID NO: 2067 - protein, 2 aa, Artificial Sequence
  Description of Artificial Sequence: Synthetic peptide
PW

SEQ ID NO: 2068 - DNA, 63 bp, Artificial Sequence; identical to SEQ ID NO: 142
  Description of Artificial Sequence: Synthetic oligonucleotide

SEQ ID NO: 2069 - protein, 21 aa, Artificial Sequence
  Description of Artificial Sequence: Synthetic peptide
MEFGLSWLFLVAILKGVQCSR

SEQ ID NO: 2070 - DNA, 318 bp, Artificial Sequence; identical to SEQ ID NO: 1003
  Description of Artificial Sequence: Synthetic polynucleotide

SEQ ID NO: 2071 - protein, 106 aa, Artificial Sequence; identical to SEQ ID NO: 1004
  Description of Artificial Sequence: Synthetic polypeptide

SEQ ID NO: 2072 - DNA, 24 bp, Artificial Sequence
  Description of Artificial Sequence: Synthetic oligonucleotide
ggcggaggaagcggaggtgggggc

SEQ ID NO: 2073 - protein, 8 aa, Artificial Sequence
  Description of Artificial Sequence: Synthetic peptide
GGGSGGGG

SEQ ID NO: 2074 - DNA, 336 bp, Artificial Sequence; identical to SEQ ID NO: 1007
  Description of Artificial Sequence: Synthetic polynucleotide

SEQ ID NO: 2075 - protein, 112 aa, Artificial Sequence; identical to SEQ ID NO: 1008
  Description of Artificial Sequence: Synthetic polypeptide

SEQ ID NO: 2076 - DNA, 6 bp, Artificial Sequence
  Description of Artificial Sequence: Synthetic oligonucleotide
ggatcc

SEQ ID NO: 2077 - protein, 2 aa, Artificial Sequence
  Description of Artificial Sequence: Synthetic peptide
GS

SEQ ID NO: 2078 - DNA, 48 bp, Artificial Sequence; identical to SEQ ID NO: 152
  Description of Artificial Sequence: Synthetic oligonucleotide

SEQ ID NO: 2079 - protein, 16 aa, Artificial Sequence
  Description of Artificial Sequence: Synthetic peptide
ELPTQGTFSNVSTNVS

SEQ ID NO: 2080 - DNA, 126 bp, Artificial Sequence; identical to SEQ ID NO: 154
  Description of Artificial Sequence: Synthetic polynucleotide

SEQ ID NO: 2081 - protein, 42 aa, Artificial Sequence; identical to SEQ ID NO: 155
  Description of Artificial Sequence: Synthetic polypeptide

SEQ ID NO: 2082 - DNA, 111 bp, Artificial Sequence; identical to SEQ ID NO: 156
  Description of Artificial Sequence: Synthetic polynucleotide

SEQ ID NO: 2083 - protein, 37 aa, Artificial Sequence; identical to SEQ ID NO: 157
  Description of Artificial Sequence: Synthetic polypeptide

SEQ ID NO: 2084 - DNA, 6 bp, Artificial Sequence
  Description of Artificial Sequence: Synthetic oligonucleotide
gtcgac

SEQ ID NO: 2085 - protein, 2 aa, Artificial Sequence
  Description of Artificial Sequence: Synthetic peptide
VD

SEQ ID NO: 2086 - DNA, 336 bp, Artificial Sequence; identical to SEQ ID NO: 426
  Description of Artificial Sequence: Synthetic polynucleotide

SEQ ID NO: 2087 - protein, 112 aa, Artificial Sequence; identical to SEQ ID NO: 161
  Description of Artificial Sequence: Synthetic polypeptide

SEQ ID NO: 2088 - DNA, 15 bp, Artificial Sequence
  Description of Artificial Sequence: Synthetic oligonucleotide
atgcatatgctggag

SEQ ID NO: 2089 - protein, 5 aa, Artificial Sequence
  Description of Artificial Sequence: Synthetic peptide
MHMLE

SEQ ID NO: 2090 - DNA, 321 bp, Artificial Sequence; identical to SEQ ID NO: 317
  Description of Artificial Sequence: Synthetic polynucleotide

SEQ ID NO: 2091 - protein, 107 aa, Artificial Sequence; identical to SEQ ID NO: 3
  Description of Artificial Sequence: Synthetic polypeptide

SEQ ID NO: 2092 - DNA, 24 bp, Artificial Sequence
  Description of Artificial Sequence: Synthetic oligonucleotide
tcaggcggtggctcaggtgtggac

SEQ ID NO: 2093 - protein, 8 aa, Artificial Sequence
  Description of Artificial Sequence: Synthetic peptide
SGGGSGVD

SEQ ID NO: 2094 - DNA, 858 bp, Artificial Sequence; identical to SEQ ID NO: 936
  Description of Artificial Sequence: Synthetic polynucleotide

SEQ ID NO: 2095 - protein, 286 aa, Artificial Sequence; identical to SEQ ID NO: 937
  Description of Artificial Sequence: Synthetic polypeptide

SEQ ID NO: 2096 - DNA, 19 bp, Artificial Sequence
  Description of Artificial Sequence: Synthetic oligonucleotide
agcggccgcaggtagcggg

SEQ ID NO: 2097 - protein, 6 aa, Artificial Sequence
  Description of Artificial Sequence: Synthetic peptide
AAAGSG

SEQ ID NO: 2098 - DNA, 516 bp, Artificial Sequence; identical to SEQ ID NO: 251
  Description of Artificial Sequence: Synthetic polynucleotide

SEQ ID NO: 2099 - protein, 172 aa, Artificial Sequence; identical to SEQ ID NO: 240
  Description of Artificial Sequence: Synthetic polypeptide

SEQ ID NO: 2100 - DNA, 6 bp, Artificial Sequence
  Description of Artificial Sequence: Synthetic oligonucleotide
gtcgag

SEQ ID NO: 2101 - protein, 2 aa, Artificial Sequence
  Description of Artificial Sequence: Synthetic peptide
VE

SEQ ID NO: 2102 - DNA, 186 bp, Artificial Sequence; identical to SEQ ID NO: 255
  Description of Artificial Sequence: Synthetic polynucleotide

SEQ ID NO: 2103 - protein, 62 aa, Artificial Sequence; identical to SEQ ID NO: 216
  Description of Artificial Sequence: Synthetic polypeptide

SEQ ID NO: 2104 - DNA, 18 bp, Artificial Sequence
  Description of Artificial Sequence: Synthetic oligonucleotide
gcggccgcaggtagcggg

SEQ ID NO: 2105 - protein, 6 aa, Artificial Sequence
  Description of Artificial Sequence: Synthetic peptide
AAAGSG

SEQ ID NO: 2106 - DNA, 57 bp, Artificial Sequence; identical to SEQ ID NO: 1283
  Description of Artificial Sequence: Synthetic oligonucleotide

SEQ ID NO: 2107 - protein, 19 aa, Artificial Sequence
  Description of Artificial Sequence: Synthetic peptide
ATNFSLLKQAGDVEENPGP

SEQ ID NO: 2108 - DNA, 6 bp, Artificial Sequence
  Description of Artificial Sequence: Synthetic oligonucleotide
gtcgag

SEQ ID NO: 2109 - protein, 2 aa, Artificial Sequence
  Description of Artificial Sequence: Synthetic peptide
VE

SEQ ID NO: 2110 - DNA, 321 bp, Artificial Sequence; identical to SEQ ID NO: 1553
  Description of Artificial Sequence: Synthetic polynucleotide

SEQ ID NO: 2111 - protein, 107 aa, Artificial Sequence; identical to SEQ ID NO: 929
  Description of Artificial Sequence: Synthetic polypeptide

SEQ ID NO: 2112 - DNA, 6 bp, Artificial Sequence
  Description of Artificial Sequence: Synthetic oligonucleotide
gtcgag

SEQ ID NO: 2113 - protein, 2 aa, Artificial Sequence
  Description of Artificial Sequence: Synthetic peptide
VE

SEQ ID NO: 2114 - DNA, 273 bp, Artificial Sequence; identical to SEQ ID NO: 1557
  Description of Artificial Sequence: Synthetic polynucleotide

SEQ ID NO: 2115 - protein, 91 aa, Artificial Sequence; identical to SEQ ID NO: 1558
  Description of Artificial Sequence: Synthetic polypeptide

SEQ ID NO: 2116-2117 - skipped (2 entries)

SEQ ID NO: 2118 - DNA, 15 bp, Artificial Sequence
  Description of Artificial Sequence: Synthetic oligonucleotide
ggatctggaccgcgg

SEQ ID NO: 2119 - protein, 5 aa, Artificial Sequence
  Description of Artificial Sequence: Synthetic peptide
GSGPR

SEQ ID NO: 2120 - DNA, 54 bp, Artificial Sequence; identical to SEQ ID NO: 138
  Description of Artificial Sequence: Synthetic oligonucleotide

SEQ ID NO: 2121 - protein, 18 aa, Artificial Sequence
  Description of Artificial Sequence: Synthetic peptide
EGRGSLLTCGDVEENPGP

SEQ ID NO: 2122 - DNA, 12 bp, Artificial Sequence
  Description of Artificial Sequence: Synthetic oligonucleotide
gcatgcgccacc

SEQ ID NO: 2123 - protein, 4 aa, Artificial Sequence
  Description of Artificial Sequence: Synthetic peptide
ACAT

SEQ ID NO: 2124 - DNA, 63 bp, Artificial Sequence; identical to SEQ ID NO: 448
  Description of Artificial Sequence: Synthetic oligonucleotide

SEQ ID NO: 2125 - protein, 21 aa, Artificial Sequence
  Description of Artificial Sequence: Synthetic peptide
MEFGLSWLFLVAILKGVQCSR

SEQ ID NO: 2126 - DNA, 357 bp, Artificial Sequence; identical to SEQ ID NO: 168
  Description of Artificial Sequence: Synthetic polynucleotide

SEQ ID NO: 2127 - protein, 119 aa, Artificial Sequence; identical to SEQ ID NO: 169
  Description of Artificial Sequence: Synthetic polypeptide

SEQ ID NO: 2128 - DNA, 45 bp, Artificial Sequence; identical to SEQ ID NO: 452
  Description of Artificial Sequence: Synthetic oligonucleotide

SEQ ID NO: 2129 - protein, 15 aa, Artificial Sequence
  Description of Artificial Sequence: Synthetic peptide
GGGGSGGGGSGGGGS

SEQ ID NO: 2130 - DNA, 327 bp, Artificial Sequence; identical to SEQ ID NO: 164
  Description of Artificial Sequence: Synthetic polynucleotide

SEQ ID NO: 2131 - protein, 112 aa, Artificial Sequence; identical to SEQ ID NO: 1008
  Description of Artificial Sequence: Synthetic polypeptide

SEQ ID NO: 2132 - DNA, 6 bp, Artificial Sequence
  Description of Artificial Sequence: Synthetic oligonucleotide
atgcat

SEQ ID NO: 2133 - protein, 2 aa, Artificial Sequence
  Description of Artificial Sequence: Synthetic peptide
MH

SEQ ID NO: 2134 - DNA, 48 bp, Artificial Sequence; identical to SEQ ID NO: 152
  Description of Artificial Sequence: Synthetic oligonucleotide

SEQ ID NO: 2135 - protein, 16 aa, Artificial Sequence
  Description of Artificial Sequence: Synthetic peptide
ELPTQGTFSNVSTNVS

SEQ ID NO: 2136 - DNA, 336 bp, Artificial Sequence; identical to SEQ ID NO: 426
  Description of Artificial Sequence: Synthetic polynucleotide

SEQ ID NO: 2137 - protein, 112 aa, Artificial Sequence; identical to SEQ ID NO: 161
  Description of Artificial Sequence: Synthetic polypeptide

SEQ ID NO: 2138 - DNA, 516 bp, Artificial Sequence; identical to SEQ ID NO: 251
  Description of Artificial Sequence: Synthetic polynucleotide

SEQ ID NO: 2139 - protein, 172 aa, Artificial Sequence; identical to SEQ ID NO: 240
  Description of Artificial Sequence: Synthetic polypeptide

SEQ ID NO: 2140 - DNA, 6 bp, Artificial Sequence
  Description of Artificial Sequence: Synthetic oligonucleotide
gtcgag

SEQ ID NO: 2141 - protein, 2 aa, Artificial Sequence
  Description of Artificial Sequence: Synthetic peptide
VE

SEQ ID NO: 2142 - DNA, 186 bp, Artificial Sequence; identical to SEQ ID NO: 255
  Description of Artificial Sequence: Synthetic polynucleotide

SEQ ID NO: 2143 - protein, 62 aa, Artificial Sequence; identical to SEQ ID NO: 216
  Description of Artificial Sequence: Synthetic polypeptide

SEQ ID NO: 2144 - DNA, 6 bp, Artificial Sequence
  Description of Artificial Sequence: Synthetic oligonucleotide
gtcgag

SEQ ID NO: 2145 - protein, 2 aa, Artificial Sequence
  Description of Artificial Sequence: Synthetic peptide
VE

SEQ ID NO: 2146 - DNA, 321 bp, Artificial Sequence; identical to SEQ ID NO: 1553
  Description of Artificial Sequence: Synthetic polynucleotide

SEQ ID NO: 2147 - protein, 107 aa, Artificial Sequence; identical to SEQ ID NO: 929
  Description of Artificial Sequence: Synthetic polypeptide

SEQ ID NO: 2148 - DNA, 6 bp, Artificial Sequence
  Description of Artificial Sequence: Synthetic oligonucleotide
gtcgag

SEQ ID NO: 2149 - protein, 2 aa, Artificial Sequence
  Description of Artificial Sequence: Synthetic peptide
VE

SEQ ID NO: 2150 - DNA, 273 bp, Artificial Sequence; identical to SEQ ID NO: 1557
  Description of Artificial Sequence: Synthetic polynucleotide

SEQ ID NO: 2151 - protein, 91 aa, Artificial Sequence; identical to SEQ ID NO: 1558
  Description of Artificial Sequence: Synthetic polypeptide

SEQ ID NO: 2152 - DNA, 18 bp, Artificial Sequence
  Description of Artificial Sequence: Synthetic oligonucleotide
gcggccgcaggtagcggg

SEQ ID NO: 2153 - protein, 6 aa, Artificial Sequence
  Description of Artificial Sequence: Synthetic peptide
AAAGSG

SEQ ID NO: 2154 - DNA, 57 bp, Artificial Sequence; identical to SEQ ID NO: 1283
  Description of Artificial Sequence: Synthetic oligonucleotide

SEQ ID NO: 2155 - protein, 19 aa, Artificial Sequence
  Description of Artificial Sequence: Synthetic peptide
ATNFSLLKQAGDVEENPGP

SEQ ID NO: 2156 - DNA, 9 bp, Artificial Sequence
  Description of Artificial Sequence: Synthetic oligonucleotide
ggatctgga

SEQ ID NO: 2157 - protein, 3 aa, Artificial Sequence
  Description of Artificial Sequence: Synthetic peptide
GSG

SEQ ID NO: 2158 - DNA, 321 bp, Artificial Sequence; identical to SEQ ID NO: 317
  Description of Artificial Sequence: Synthetic polynucleotide

SEQ ID NO: 2159 - protein, 107 aa, Artificial Sequence; identical to SEQ ID NO: 3
  Description of Artificial Sequence: Synthetic polypeptide

SEQ ID NO: 2160 - DNA, 24 bp, Artificial Sequence
  Description of Artificial Sequence: Synthetic oligonucleotide
tcaggcggtggctcaggtgtggac

SEQ ID NO: 2161 - protein, 8 aa, Artificial Sequence
  Description of Artificial Sequence: Synthetic peptide
SGGGSGVD

SEQ ID NO: 2162 - DNA, 858 bp, Artificial Sequence; identical to SEQ ID NO: 936
  Description of Artificial Sequence: Synthetic polynucleotide

SEQ ID NO: 2163 - protein, 286 aa, Artificial Sequence; identical to SEQ ID NO: 937
  Description of Artificial Sequence: Synthetic polypeptide

SEQ ID NO: 2164 - DNA, 15 bp, Artificial Sequence
  Description of Artificial Sequence: Synthetic oligonucleotide
ggatctggaccgcgg

SEQ ID NO: 2165 - protein, 5 aa, Artificial Sequence
  Description of Artificial Sequence: Synthetic peptide
GSGPR

SEQ ID NO: 2166 - DNA, 54 bp, Artificial Sequence; identical to SEQ ID NO: 138
  Description of Artificial Sequence: Synthetic oligonucleotide

SEQ ID NO: 2167 - protein, 18 aa, Artificial Sequence
  Description of Artificial Sequence: Synthetic peptide
EGRGSLLTCGDVEENPGP

SEQ ID NO: 2168 - DNA, 12 bp, Artificial Sequence
  Description of Artificial Sequence: Synthetic oligonucleotide
gcatgcgccacc

SEQ ID NO: 2169 - protein, 4 aa, Artificial Sequence
  Description of Artificial Sequence: Synthetic peptide
ACAT

SEQ ID NO: 2170 - DNA, 63 bp, Artificial Sequence; identical to SEQ ID NO: 448
  Description of Artificial Sequence: Synthetic oligonucleotide

SEQ ID NO: 2171 - protein, 21 aa, Artificial Sequence
  Description of Artificial Sequence: Synthetic peptide
MEFGLSWLFLVAILKGVQCSR

SEQ ID NO: 2172 - DNA, 357 bp, Artificial Sequence; identical to SEQ ID NO: 168
  Description of Artificial Sequence: Synthetic polynucleotide

SEQ ID NO: 2173 - protein, 119 aa, Artificial Sequence; identical to SEQ ID NO: 169
  Description of Artificial Sequence: Synthetic polypeptide

SEQ ID NO: 2174 - DNA, 45 bp, Artificial Sequence; identical to SEQ ID NO: 452
  Description of Artificial Sequence: Synthetic oligonucleotide

SEQ ID NO: 2175 - protein, 15 aa, Artificial Sequence
  Description of Artificial Sequence: Synthetic peptide
GGGGSGGGGSGGGGS

SEQ ID NO: 2176 - DNA, 327 bp, Artificial Sequence; identical to SEQ ID NO: 164
  Description of Artificial Sequence: Synthetic polynucleotide

SEQ ID NO: 2177 - protein, 112 aa, Artificial Sequence; identical to SEQ ID NO: 1008
  Description of Artificial Sequence: Synthetic polypeptide

SEQ ID NO: 2178 - DNA, 6 bp, Artificial Sequence
  Description of Artificial Sequence: Synthetic oligonucleotide
atgcat

SEQ ID NO: 2179 - protein, 2 aa, Artificial Sequence
  Description of Artificial Sequence: Synthetic peptide
MH

SEQ ID NO: 2180 - DNA, 48 bp, Artificial Sequence; identical to SEQ ID NO: 152
  Description of Artificial Sequence: Synthetic oligonucleotide

SEQ ID NO: 2181 - protein, 16 aa, Artificial Sequence
  Description of Artificial Sequence: Synthetic peptide
ELPTQGTFSNVSTNVS

SEQ ID NO: 2182 - DNA, 336 bp, Artificial Sequence; identical to SEQ ID NO: 426
  Description of Artificial Sequence: Synthetic polynucleotide

SEQ ID NO: 2183 - protein, 112 aa, Artificial Sequence; identical to SEQ ID NO: 161
  Description of Artificial Sequence: Synthetic polypeptide

SEQ ID NO: 2184 - DNA, 516 bp, Artificial Sequence; identical to SEQ ID NO: 251
  Description of Artificial Sequence: Synthetic polynucleotide

SEQ ID NO: 2185 - protein, 172 aa, Artificial Sequence; identical to SEQ ID NO: 240
  Description of Artificial Sequence: Synthetic polypeptide

SEQ ID NO: 2186 - DNA, 6 bp, Artificial Sequence
  Description of Artificial Sequence: Synthetic oligonucleotide
gtcgag

SEQ ID NO: 2187 - protein, 2 aa, Artificial Sequence
  Description of Artificial Sequence: Synthetic peptide
VE

SEQ ID NO: 2188 - DNA, 186 bp, Artificial Sequence; identical to SEQ ID NO: 255
  Description of Artificial Sequence: Synthetic polynucleotide

SEQ ID NO: 2189 - protein, 62 aa, Artificial Sequence; identical to SEQ ID NO: 216
  Description of Artificial Sequence: Synthetic polypeptide

SEQ ID NO: 2190 - DNA, 6 bp, Artificial Sequence
  Description of Artificial Sequence: Synthetic oligonucleotide
gtcgag

SEQ ID NO: 2191 - protein, 2 aa, Artificial Sequence
  Description of Artificial Sequence: Synthetic peptide
VE

SEQ ID NO: 2192 - DNA, 321 bp, Artificial Sequence; identical to SEQ ID NO: 1553
  Description of Artificial Sequence: Synthetic polynucleotide

SEQ ID NO: 2193 - protein, 107 aa, Artificial Sequence; identical to SEQ ID NO: 929
  Description of Artificial Sequence: Synthetic polypeptide

SEQ ID NO: 2194 - DNA, 6 bp, Artificial Sequence
  Description of Artificial Sequence: Synthetic oligonucleotide
gtcgag

SEQ ID NO: 2195 - protein, 2 aa, Artificial Sequence
  Description of Artificial Sequence: Synthetic peptide
VE

SEQ ID NO: 2196 - DNA, 273 bp, Artificial Sequence; identical to SEQ ID NO: 1557
  Description of Artificial Sequence: Synthetic polynucleotide

SEQ ID NO: 2197 - protein, 91 aa, Artificial Sequence; identical to SEQ ID NO: 1558
  Description of Artificial Sequence: Synthetic polypeptide

SEQ ID NO: 2198 - DNA, 18 bp, Artificial Sequence
  Description of Artificial Sequence: Synthetic oligonucleotide
gcggccgcaggtagcggg

SEQ ID NO: 2199 - protein, 6 aa, Artificial Sequence
  Description of Artificial Sequence: Synthetic peptide
AAAGSG

SEQ ID NO: 2200 - DNA, 57 bp, Artificial Sequence; identical to SEQ ID NO: 1283
  Description of Artificial Sequence: Synthetic oligonucleotide

SEQ ID NO: 2201 - protein, 19 aa, Artificial Sequence
  Description of Artificial Sequence: Synthetic peptide
ATNFSLLKQAGDVEENPGP

SEQ ID NO: 2202 - DNA, 15 bp, Artificial Sequence
  Description of Artificial Sequence: Synthetic oligonucleotide
atgcatatgctggag

SEQ ID NO: 2203 - protein, 5 aa, Artificial Sequence
  Description of Artificial Sequence: Synthetic peptide
MHMLE

SEQ ID NO: 2204 - DNA, 321 bp, Artificial Sequence; identical to SEQ ID NO: 317
  Description of Artificial Sequence: Synthetic polynucleotide

SEQ ID NO: 2205 - protein, 107 aa, Artificial Sequence; identical to SEQ ID NO: 3
  Description of Artificial Sequence: Synthetic polypeptide

SEQ ID NO: 2206 - DNA, 24 bp, Artificial Sequence
  Description of Artificial Sequence: Synthetic oligonucleotide
tcaggcggtggctcaggtgtggac

SEQ ID NO: 2207 - protein, 8 aa, Artificial Sequence
  Description of Artificial Sequence: Synthetic peptide
SGGGSGVD

SEQ ID NO: 2208 - DNA, 858 bp, Artificial Sequence; identical to SEQ ID NO: 936
  Description of Artificial Sequence: Synthetic polynucleotide

SEQ ID NO: 2209 - protein, 286 aa, Artificial Sequence; identical to SEQ ID NO: 937
  Description of Artificial Sequence: Synthetic polypeptide

SEQ ID NO: 2210 - DNA, 15 bp, Artificial Sequence
  Description of Artificial Sequence: Synthetic oligonucleotide
ggatctggaccgcgg

SEQ ID NO: 2211 - protein, 5 aa, Artificial Sequence
  Description of Artificial Sequence: Synthetic peptide
GSGPR

SEQ ID NO: 2212 - DNA, 54 bp, Artificial Sequence; identical to SEQ ID NO: 138
  Description of Artificial Sequence: Synthetic oligonucleotide

SEQ ID NO: 2213 - protein, 18 aa, Artificial Sequence
  Description of Artificial Sequence: Synthetic peptide
EGRGSLLTCGDVEENPGP

SEQ ID NO: 2214 - DNA, 6 bp, Artificial Sequence
  Description of Artificial Sequence: Synthetic oligonucleotide
ccacgg

SEQ ID NO: 2215 - protein, 2 aa, Artificial Sequence
  Description of Artificial Sequence: Synthetic peptide
PR

SEQ ID NO: 2216 - DNA, 63 bp, Artificial Sequence; identical to SEQ ID NO: 142
  Description of Artificial Sequence: Synthetic oligonucleotide

SEQ ID NO: 2217 - protein, 21 aa, Artificial Sequence
  Description of Artificial Sequence: Synthetic peptide
MEFGLSWLFLVAILKGVQCSR

SEQ ID NO: 2218 - DNA, 318 bp, Artificial Sequence; identical to SEQ ID NO: 1003
  Description of Artificial Sequence: Synthetic polynucleotide

SEQ ID NO: 2219 - protein, 106 aa, Artificial Sequence; identical to SEQ ID NO: 1004
  Description of Artificial Sequence: Synthetic polypeptide

SEQ ID NO: 2220 - DNA, 24 bp, Artificial Sequence
  Description of Artificial Sequence: Synthetic oligonucleotide
ggcggaggaagcggaggtgggggc

SEQ ID NO: 2221 - protein, 8 aa, Artificial Sequence
  Description of Artificial Sequence: Synthetic peptide
GGGSGGGG

SEQ ID NO: 2222 - DNA, 336 bp, Artificial Sequence; identical to SEQ ID NO: 1007
  Description of Artificial Sequence: Synthetic polynucleotide

SEQ ID NO: 2223 - protein, 112 aa, Artificial Sequence; identical to SEQ ID NO: 1008
  Description of Artificial Sequence: Synthetic polypeptide

SEQ ID NO: 2224 - DNA, 6 bp, Artificial Sequence
  Description of Artificial Sequence: Synthetic oligonucleotide
ggatcc

SEQ ID NO: 2225 - protein, 2 aa, Artificial Sequence
  Description of Artificial Sequence: Synthetic peptide
GS

SEQ ID NO: 2226 - DNA, 48 bp, Artificial Sequence; identical to SEQ ID NO: 152
  Description of Artificial Sequence: Synthetic oligonucleotide

SEQ ID NO: 2227 - protein, 16 aa, Artificial Sequence
  Description of Artificial Sequence: Synthetic peptide
ELPTQGTFSNVSTNVS

SEQ ID NO: 2228 - DNA, 336 bp, Artificial Sequence; identical to SEQ ID NO: 426
  Description of Artificial Sequence: Synthetic polynucleotide

SEQ ID NO: 2229 - protein, 112 aa, Artificial Sequence; identical to SEQ ID NO: 161
  Description of Artificial Sequence: Synthetic polypeptide

SEQ ID NO: 2230 - DNA, 273 bp, Artificial Sequence
  Description of Artificial Sequence: Synthetic polynucleotide
atgttggaaatgtggcatgaagggttggaagaagcttcaaggctgtacttcggagagaggaacgtgaagggcatgtttgaggttcttgaacctctgcacgccatgatggaacggggaccgcagacactgaaagaaacctcttttaatcaggcctacggcagagacctgatggaggcccaagaatggtgtagaaagtatatgaaatccggtaacgtgaaagacctgctccaggcctgggacctttattaccatgtgttcaggcggatcagtaag

SEQ ID NO: 2231 - protein, 91 aa, Artificial Sequence
  Description of Artificial Sequence: Synthetic polypeptide
MLEMWHEGLEEASRLYFGERNVKGMFEVLEPLHAMMERGPQTLKETSFNQAYGRDLMEAQEWCRKYMKSGNVKDLLQAWDLYYHVFRRISK

SEQ ID NO: 2232 - DNA, 6 bp, Artificial Sequence
  Description of Artificial Sequence: Synthetic oligonucleotide
gtcgag

SEQ ID NO: 2233 - protein, 2 aa, Artificial Sequence
  Description of Artificial Sequence: Synthetic peptide
VE

SEQ ID NO: 2234 - DNA, 321 bp, Artificial Sequence; identical to SEQ ID NO: 1553
  Description of Artificial Sequence: Synthetic polynucleotide

SEQ ID NO: 2235 - protein, 107 aa, Artificial Sequence; identical to SEQ ID NO: 929
  Description of Artificial Sequence: Synthetic polypeptide

SEQ ID NO: 2236 - DNA, 516 bp, Artificial Sequence; identical to SEQ ID NO: 251
  Description of Artificial Sequence: Synthetic polynucleotide

SEQ ID NO: 2237 - protein, 172 aa, Artificial Sequence; identical to SEQ ID NO: 240
  Description of Artificial Sequence: Synthetic polypeptide

SEQ ID NO: 2238 - DNA, 6 bp, Artificial Sequence
  Description of Artificial Sequence: Synthetic oligonucleotide
gtcgag

SEQ ID NO: 2239 - protein, 2 aa, Artificial Sequence
  Description of Artificial Sequence: Synthetic peptide
VE

SEQ ID NO: 2240 - DNA, 186 bp, Artificial Sequence; identical to SEQ ID NO: 255
  Description of Artificial Sequence: Synthetic polynucleotide

SEQ ID NO: 2241 - protein, 62 aa, Artificial Sequence; identical to SEQ ID NO: 216
  Description of Artificial Sequence: Synthetic polypeptide

SEQ ID NO: 2242 - DNA, 9 bp, Artificial Sequence
  Description of Artificial Sequence: Synthetic oligonucleotide
ggatctgga

SEQ ID NO: 2243 - protein, 3 aa, Artificial Sequence
  Description of Artificial Sequence: Synthetic peptide
GSG

SEQ ID NO: 2244 - DNA, 57 bp, Artificial Sequence; identical to SEQ ID NO: 1283
  Description of Artificial Sequence: Synthetic oligonucleotide

SEQ ID NO: 2245 - protein, 19 aa, Artificial Sequence
  Description of Artificial Sequence: Synthetic peptide
ATNFSLLKQAGDVEENPGP

SEQ ID NO: 2246 - DNA, 15 bp, Artificial Sequence
  Description of Artificial Sequence: Synthetic oligonucleotide
atgcatatgctggag

SEQ ID NO: 2247 - protein, 5 aa, Artificial Sequence
  Description of Artificial Sequence: Synthetic peptide
MHMLE

SEQ ID NO: 2248 - DNA, 321 bp, Artificial Sequence; identical to SEQ ID NO: 317
  Description of Artificial Sequence: Synthetic polynucleotide

SEQ ID NO: 2249 - protein, 107 aa, Artificial Sequence; identical to SEQ ID NO: 3
  Description of Artificial Sequence: Synthetic polypeptide

SEQ ID NO: 2250 - DNA, 24 bp, Artificial Sequence
  Description of Artificial Sequence: Synthetic oligonucleotide
tcaggcggtggctcaggtgtggac

SEQ ID NO: 2251 - protein, 8 aa, Artificial Sequence
  Description of Artificial Sequence: Synthetic peptide
SGGGSGVD

SEQ ID NO: 2252 - DNA, 858 bp, Artificial Sequence; identical to SEQ ID NO: 936
  Description of Artificial Sequence: Synthetic polynucleotide

SEQ ID NO: 2253 - protein, 286 aa, Artificial Sequence; identical to SEQ ID NO: 937
  Description of Artificial Sequence: Synthetic polypeptide

SEQ ID NO: 2254 - DNA, 15 bp, Artificial Sequence
  Description of Artificial Sequence: Synthetic oligonucleotide
ggatctggaccgcgg

SEQ ID NO: 2255 - protein, 5 aa, Artificial Sequence
  Description of Artificial Sequence: Synthetic peptide
GSGPR

SEQ ID NO: 2256 - DNA, 54 bp, Artificial Sequence; identical to SEQ ID NO: 138
  Description of Artificial Sequence: Synthetic oligonucleotide

SEQ ID NO: 2257 - protein, 18 aa, Artificial Sequence
  Description of Artificial Sequence: Synthetic peptide
EGRGSLLTCGDVEENPGP

SEQ ID NO: 2258 - DNA, 6 bp, Artificial Sequence
  Description of Artificial Sequence: Synthetic oligonucleotide
ccacgg

SEQ ID NO: 2259 - protein, 2 aa, Artificial Sequence
  Description of Artificial Sequence: Synthetic peptide
PR

SEQ ID NO: 2260 - DNA, 63 bp, Artificial Sequence; identical to SEQ ID NO: 142
  Description of Artificial Sequence: Synthetic oligonucleotide

SEQ ID NO: 2261 - protein, 21 aa, Artificial Sequence
  Description of Artificial Sequence: Synthetic peptide
MEFGLSWLFLVAILKGVQCSR

SEQ ID NO: 2262 - DNA, 318 bp, Artificial Sequence; identical to SEQ ID NO: 1003
  Description of Artificial Sequence: Synthetic polynucleotide

SEQ ID NO: 2263 - protein, 106 aa, Artificial Sequence; identical to SEQ ID NO: 1004
  Description of Artificial Sequence: Synthetic polypeptide

SEQ ID NO: 2264 - DNA, 24 bp, Artificial Sequence
  Description of Artificial Sequence: Synthetic oligonucleotide
ggcggaggaagcggaggtgggggc

SEQ ID NO: 2265 - protein, 8 aa, Artificial Sequence
  Description of Artificial Sequence: Synthetic peptide
GGGSGGGG

SEQ ID NO: 2266 - DNA, 336 bp, Artificial Sequence; identical to SEQ ID NO: 1007
  Description of Artificial Sequence: Synthetic polynucleotide

SEQ ID NO: 2267 - protein, 112 aa, Artificial Sequence; identical to SEQ ID NO: 1008
  Description of Artificial Sequence: Synthetic polypeptide

SEQ ID NO: 2268 - DNA, 6 bp, Artificial Sequence
  Description of Artificial Sequence: Synthetic oligonucleotide
ggatcc

SEQ ID NO: 2269 - protein, 2 aa, Artificial Sequence
  Description of Artificial Sequence: Synthetic peptide
GS

SEQ ID NO: 2270 - DNA, 48 bp, Artificial Sequence; identical to SEQ ID NO: 152
  Description of Artificial Sequence: Synthetic oligonucleotide

SEQ ID NO: 2271 - protein, 16 aa, Artificial Sequence
  Description of Artificial Sequence: Synthetic peptide
ELPTQGTFSNVSTNVS

SEQ ID NO: 2272 - DNA, 336 bp, Artificial Sequence; identical to SEQ ID NO: 426
  Description of Artificial Sequence: Synthetic polynucleotide

SEQ ID NO: 2273 - protein, 112 aa, Artificial Sequence; identical to SEQ ID NO: 161
  Description of Artificial Sequence: Synthetic polypeptide

SEQ ID NO: 2274 - DNA, 273 bp, Artificial Sequence; identical to SEQ ID NO: 2230
  Description of Artificial Sequence: Synthetic polynucleotide

SEQ ID NO: 2275 - protein, 91 aa, Artificial Sequence; identical to SEQ ID NO: 2231
  Description of Artificial Sequence: Synthetic polypeptide

SEQ ID NO: 2276 - DNA, 6 bp, Artificial Sequence
  Description of Artificial Sequence: Synthetic oligonucleotide
gtcgag

SEQ ID NO: 2277 - protein, 2 aa, Artificial Sequence
  Description of Artificial Sequence: Synthetic peptide
VE

SEQ ID NO: 2278 - DNA, 321 bp, Artificial Sequence; identical to SEQ ID NO: 1553
  Description of Artificial Sequence: Synthetic polynucleotide

SEQ ID NO: 2279 - protein, 107 aa, Artificial Sequence; identical to SEQ ID NO: 929
  Description of Artificial Sequence: Synthetic polypeptide

SEQ ID NO: 2280 - DNA, 516 bp, Artificial Sequence; identical to SEQ ID NO: 251
  Description of Artificial Sequence: Synthetic polynucleotide

SEQ ID NO: 2281 - protein, 172 aa, Artificial Sequence; identical to SEQ ID NO: 240
  Description of Artificial Sequence: Synthetic polypeptide

SEQ ID NO: 2282 - DNA, 6 bp, Artificial Sequence
  Description of Artificial Sequence: Synthetic oligonucleotide
gtcgag

SEQ ID NO: 2283 - protein, 2 aa, Artificial Sequence
  Description of Artificial Sequence: Synthetic peptide
VE

SEQ ID NO: 2284 - DNA, 186 bp, Artificial Sequence; identical to SEQ ID NO: 255
  Description of Artificial Sequence: Synthetic polynucleotide

SEQ ID NO: 2285 - protein, 62 aa, Artificial Sequence; identical to SEQ ID NO: 216
  Description of Artificial Sequence: Synthetic polypeptide

SEQ ID NO: 2286 - DNA, 9 bp, Artificial Sequence
  Description of Artificial Sequence: Synthetic oligonucleotide
ggatctgga

SEQ ID NO: 2287 - protein, 3 aa, Artificial Sequence
  Description of Artificial Sequence: Synthetic peptide
GSG

SEQ ID NO: 2288 - DNA, 57 bp, Artificial Sequence; identical to SEQ ID NO: 1283
  Description of Artificial Sequence: Synthetic oligonucleotide

SEQ ID NO: 2289 - protein, 19 aa, Artificial Sequence
  Description of Artificial Sequence: Synthetic peptide
ATNFSLLKQAGDVEENPGP

SEQ ID NO: 2290 - DNA, 15 bp, Artificial Sequence
  Description of Artificial Sequence: Synthetic oligonucleotide
atgcatatgctggag

SEQ ID NO: 2291 - protein, 5 aa, Artificial Sequence
  Description of Artificial Sequence: Synthetic peptide
MHMLE

SEQ ID NO: 2292 - DNA, 321 bp, Artificial Sequence; identical to SEQ ID NO: 317
  Description of Artificial Sequence: Synthetic polynucleotide

SEQ ID NO: 2293 - protein, 107 aa, Artificial Sequence; identical to SEQ ID NO: 3
  Description of Artificial Sequence: Synthetic polypeptide

SEQ ID NO: 2294 - DNA, 24 bp, Artificial Sequence
  Description of Artificial Sequence: Synthetic oligonucleotide
tcaggcggtggctcaggtgtggac

SEQ ID NO: 2295 - protein, 8 aa, Artificial Sequence
  Description of Artificial Sequence: Synthetic peptide
SGGGSGVD

SEQ ID NO: 2296 - DNA, 858 bp, Artificial Sequence; identical to SEQ ID NO: 936
  Description of Artificial Sequence: Synthetic polynucleotide

SEQ ID NO: 2297 - protein, 286 aa, Artificial Sequence; identical to SEQ ID NO: 937
  Description of Artificial Sequence: Synthetic polypeptide

SEQ ID NO: 2298 - DNA, 15 bp, Artificial Sequence
  Description of Artificial Sequence: Synthetic oligonucleotide
ggatctggaccgcgg

SEQ ID NO: 2299 - protein, 5 aa, Artificial Sequence
  Description of Artificial Sequence: Synthetic peptide
GSGPR

SEQ ID NO: 2300 - DNA, 54 bp, Artificial Sequence; identical to SEQ ID NO: 138
  Description of Artificial Sequence: Synthetic oligonucleotide

SEQ ID NO: 2301 - protein, 18 aa, Artificial Sequence
  Description of Artificial Sequence: Synthetic peptide
EGRGSLLTCGDVEENPGP

SEQ ID NO: 2302 - DNA, 12 bp, Artificial Sequence
  Description of Artificial Sequence: Synthetic oligonucleotide
gcatgcgccacc

SEQ ID NO: 2303 - protein, 4 aa, Artificial Sequence
  Description of Artificial Sequence: Synthetic peptide
ACAT

SEQ ID NO: 2304 - DNA, 63 bp, Artificial Sequence; identical to SEQ ID NO: 448
  Description of Artificial Sequence: Synthetic oligonucleotide

SEQ ID NO: 2305 - protein, 21 aa, Artificial Sequence
  Description of Artificial Sequence: Synthetic peptide
MEFGLSWLFLVAILKGVQCSR

SEQ ID NO: 2306 - DNA, 357 bp, Artificial Sequence; identical to SEQ ID NO: 168
  Description of Artificial Sequence: Synthetic polynucleotide

SEQ ID NO: 2307 - protein, 119 aa, Artificial Sequence; identical to SEQ ID NO: 169
  Description of Artificial Sequence: Synthetic polypeptide

SEQ ID NO: 2308 - DNA, 45 bp, Artificial Sequence; identical to SEQ ID NO: 452
  Description of Artificial Sequence: Synthetic oligonucleotide

SEQ ID NO: 2309 - protein, 15 aa, Artificial Sequence
  Description of Artificial Sequence: Synthetic peptide
GGGGSGGGGSGGGGS

SEQ ID NO: 2310 - DNA, 327 bp, Artificial Sequence; identical to SEQ ID NO: 164
  Description of Artificial Sequence: Synthetic polynucleotide

SEQ ID NO: 2311 - protein, 112 aa, Artificial Sequence; identical to SEQ ID NO: 1008
  Description of Artificial Sequence: Synthetic polypeptide

SEQ ID NO: 2312 - DNA, 6 bp, Artificial Sequence
  Description of Artificial Sequence: Synthetic oligonucleotide
atgcat

SEQ ID NO: 2313 - protein, 2 aa, Artificial Sequence
  Description of Artificial Sequence: Synthetic peptide
MH

SEQ ID NO: 2314 - DNA, 48 bp, Artificial Sequence; identical to SEQ ID NO: 152
  Description of Artificial Sequence: Synthetic oligonucleotide

SEQ ID NO: 2315 - protein, 16 aa, Artificial Sequence
  Description of Artificial Sequence: Synthetic peptide
ELPTQGTFSNVSTNVS

SEQ ID NO: 2316 - DNA, 336 bp, Artificial Sequence; identical to SEQ ID NO: 426
  Description of Artificial Sequence: Synthetic polynucleotide

SEQ ID NO: 2317 - protein, 112 aa, Artificial Sequence; identical to SEQ ID NO: 161
  Description of Artificial Sequence: Synthetic polypeptide

SEQ ID NO: 2318 - DNA, 324 bp, Artificial Sequence
  Description of Artificial Sequence: Synthetic polynucleotide
atgggcgtccaagtcgaaaccattagtcccggcgatggcagaacatttcctacaaggggacaaacatgtgtcgtccattatacaggcatgttggaggacggcaaaaagttcgacagtagtagagatcgcaataaacctttcaaattcatgttgggaaaacaagaagtcattaggggatgggaggagggcgtggctcaaatgtccgtcggccaacgcgctaagctcaccatcagccccgactacgcatacggcgctaccggacatcccggaattattccccctcacgctaccttggtgtttgacgtcgaactgttgaagctcgaa

SEQ ID NO: 2319 - protein, 108 aa, Artificial Sequence
  Description of Artificial Sequence: Synthetic polypeptide
MGVQVETISPGDGRTFPKRGQTCVVHYTGMLEDGKKFDSSRDRNKPFKFMLGKQEVIRGWEEGVAQMSVGQRAKLTISPDYAYGATGHPGIIPPHATLVFDVELLKLE

SEQ ID NO: 2320 - DNA, 27 bp, Artificial Sequence
  Description of Artificial Sequence: Synthetic oligonucleotide
ggatcaggcggtggcagcggccaattg

SEQ ID NO: 2321 - protein, 9 aa, Artificial Sequence
  Description of Artificial Sequence: Synthetic peptide
GSGGGSGEL

SEQ ID NO: 2322 - DNA, 273 bp, Artificial Sequence; identical to SEQ ID NO: 2230
  Description of Artificial Sequence: Synthetic polynucleotide

SEQ ID NO: 2323 - protein, 91 aa, Artificial Sequence; identical to SEQ ID NO: 2231
  Description of Artificial Sequence: Synthetic polypeptide

SEQ ID NO: 2324 - DNA, 15 bp, Artificial Sequence
  Description of Artificial Sequence: Synthetic oligonucleotide
ggcagtggaggcggg

SEQ ID NO: 2325 - protein, 6 aa, Artificial Sequence
  Description of Artificial Sequence: Synthetic peptide
GSGGGM

SEQ ID NO: 2326 - DNA, 516 bp, Artificial Sequence; identical to SEQ ID NO: 251
  Description of Artificial Sequence: Synthetic polynucleotide

SEQ ID NO: 2327 - protein, 172 aa, Artificial Sequence; identical to SEQ ID NO: 240
  Description of Artificial Sequence: Synthetic polypeptide

SEQ ID NO: 2328 - DNA, 6 bp, Artificial Sequence
  Description of Artificial Sequence: Synthetic oligonucleotide
gtcgag

SEQ ID NO: 2329 - protein, 2 aa, Artificial Sequence
  Description of Artificial Sequence: Synthetic peptide
VE

SEQ ID NO: 2330 - DNA, 186 bp, Artificial Sequence; identical to SEQ ID NO: 255
  Description of Artificial Sequence: Synthetic polynucleotide

SEQ ID NO: 2331 - protein, 62 aa, Artificial Sequence; identical to SEQ ID NO: 216
  Description of Artificial Sequence: Synthetic polypeptide

SEQ ID NO: 2332 - DNA, 9 bp, Artificial Sequence
  Description of Artificial Sequence: Synthetic oligonucleotide
ggatctgga

SEQ ID NO: 2333 - protein, 3 aa, Artificial Sequence
  Description of Artificial Sequence: Synthetic peptide
GSG

SEQ ID NO: 2334 - DNA, 57 bp, Artificial Sequence; identical to SEQ ID NO: 1283
  Description of Artificial Sequence: Synthetic oligonucleotide

SEQ ID NO: 2335 - protein, 19 aa, Artificial Sequence
  Description of Artificial Sequence: Synthetic peptide
ATNFSLLKQAGDVEENPGP

SEQ ID NO: 2336 - DNA, 15 bp, Artificial Sequence
  Description of Artificial Sequence: Synthetic oligonucleotide
atgcatatgctggag

SEQ ID NO: 2337 - protein, 5 aa, Artificial Sequence
  Description of Artificial Sequence: Synthetic peptide
MHMLE

SEQ ID NO: 2338 - DNA, 321 bp, Artificial Sequence; identical to SEQ ID NO: 317
  Description of Artificial Sequence: Synthetic polynucleotide

SEQ ID NO: 2339 - protein, 107 aa, Artificial Sequence; identical to SEQ ID NO: 3
  Description of Artificial Sequence: Synthetic polypeptide

SEQ ID NO: 2340 - DNA, 24 bp, Artificial Sequence
  Description of Artificial Sequence: Synthetic oligonucleotide
tcaggcggtggctcaggtgtggac

SEQ ID NO: 2341 - protein, 8 aa, Artificial Sequence
  Description of Artificial Sequence: Synthetic peptide
SGGGSGVD

SEQ ID NO: 2342 - DNA, 858 bp, Artificial Sequence; identical to SEQ ID NO: 936
  Description of Artificial Sequence: Synthetic polynucleotide

SEQ ID NO: 2343 - protein, 286 aa, Artificial Sequence; identical to SEQ ID NO: 937
  Description of Artificial Sequence: Synthetic polypeptide

SEQ ID NO: 2344 - DNA, 15 bp, Artificial Sequence
  Description of Artificial Sequence: Synthetic oligonucleotide
ggatctggaccgcgg

SEQ ID NO: 2345 - protein, 5 aa, Artificial Sequence
  Description of Artificial Sequence: Synthetic peptide
GSGPR

SEQ ID NO: 2346 - DNA, 54 bp, Artificial Sequence; identical to SEQ ID NO: 138
  Description of Artificial Sequence: Synthetic oligonucleotide

SEQ ID NO: 2347 - protein, 18 aa, Artificial Sequence
  Description of Artificial Sequence: Synthetic peptide
EGRGSLLTCGDVEENPGP

SEQ ID NO: 2348 - DNA, 6 bp, Artificial Sequence
  Description of Artificial Sequence: Synthetic oligonucleotide
ccacgg

SEQ ID NO: 2349 - protein, 2 aa, Artificial Sequence
  Description of Artificial Sequence: Synthetic peptide
PR

SEQ ID NO: 2350 - DNA, 63 bp, Artificial Sequence; identical to SEQ ID NO: 142
  Description of Artificial Sequence: Synthetic oligonucleotide

SEQ ID NO: 2351 - protein, 21 aa, Artificial Sequence
  Description of Artificial Sequence: Synthetic peptide
MEFGLSWLFLVAILKGVQCSR

SEQ ID NO: 2352 - DNA, 318 bp, Artificial Sequence; identical to SEQ ID NO: 1003
  Description of Artificial Sequence: Synthetic polynucleotide

SEQ ID NO: 2353 - protein, 106 aa, Artificial Sequence; identical to SEQ ID NO: 1004
  Description of Artificial Sequence: Synthetic polypeptide

SEQ ID NO: 2354 - DNA, 24 bp, Artificial Sequence
  Description of Artificial Sequence: Synthetic oligonucleotide
ggcggaggaagcggaggtgggggc

SEQ ID NO: 2355 - protein, 8 aa, Artificial Sequence
  Description of Artificial Sequence: Synthetic peptide
GGGSGGGG

SEQ ID NO: 2356 - DNA, 336 bp, Artificial Sequence; identical to SEQ ID NO: 1007
  Description of Artificial Sequence: Synthetic polynucleotide

SEQ ID NO: 2357 - protein, 112 aa, Artificial Sequence; identical to SEQ ID NO: 1008
  Description of Artificial Sequence: Synthetic polypeptide

SEQ ID NO: 2358 - DNA, 6 bp, Artificial Sequence
  Description of Artificial Sequence: Synthetic oligonucleotide
ggatcc

SEQ ID NO: 2359 - protein, 2 aa, Artificial Sequence
  Description of Artificial Sequence: Synthetic peptide
GS

SEQ ID NO: 2360 - DNA, 48 bp, Artificial Sequence; identical to SEQ ID NO: 152
  Description of Artificial Sequence: Synthetic oligonucleotide

SEQ ID NO: 2361 - protein, 16 aa, Artificial Sequence
  Description of Artificial Sequence: Synthetic peptide
ELPTQGTFSNVSTNVS

SEQ ID NO: 2362 - DNA, 336 bp, Artificial Sequence; identical to SEQ ID NO: 426
  Description of Artificial Sequence: Synthetic polynucleotide

SEQ ID NO: 2363 - protein, 112 aa, Artificial Sequence; identical to SEQ ID NO: 161
  Description of Artificial Sequence: Synthetic polypeptide

SEQ ID NO: 2364 - protein, 4 aa, Artificial Sequence
  Description of Artificial Sequence: Synthetic peptide
LEHD
